United States Patent Application Publication US 2024/0226191 A1 - sequence listing, part 5

SEQ ID NO: 27 - DNA, 3318901 bp, Mediterraneibacter faecis (residues 1-1,659,451 of 3,318,901)
attgttgttgacctcataaattatcaaaatactgatttacttgcctgtctctgaattgacctgtatactgtcatcagcatacaaaaaggaaaaggtctcagagcaccctcctagcaagttgtgtactctgagaccctggtcactaaaccatggttattatatcagattattcacttgtcctcaaggaggattttggtgttttttgttgagagcagtgtgaccacccatatgtgccccatctgtcaggctacgcttcgttaccgggattcacgcccacgcatccgtagaaaggaaggcggtttaaaagatcagttgatcattcggcggttttattgtaagaactgccactcttatcataatgaacttccggattgtcttgttccgtacaagcattacgaaacagaagtgatctccggggtgctggatggcgttgtacagccggaagacttagattctgaagactacccgtcctgcgctaccatgctccgctggctgcaatggttctgcgaaaatcttgaacgtatcaacggatatttaaggacgatcagggagttcctgctgggttataacgaagagaggatttcccttggttcactgctcgattctttcagaaaccaatatcaaaactggttagaaatcatcttgcgtcagatttacaacagcgggggatttttagtcccgatctgctggtaaggcttatgcacctactttgcatcgtctgtcgcggtaccaacgggtatagtggtctcaaaaggaggtcactattttatgaatacaagaataaacaaacaacaatggcaggaagaagaagccctcaggcgtttccaattgatttctccgcttctccaggctgatctggatgatgcaaaacggatccagctgcgcaaaaagattgcagaggagaatcatatatcggtccgttccctttaccgttatgaaaaagcgttttcggaaaggcagtttacagggctaaagccggctgaccgggagaaacaccgctcacaaaaactccctgaaaactttgagtttctgttggagcaggcaatccagctacgcaaggaggttcccgagcggtcggttgcccagatcatctacatcctggaaacggaagggcttgcagcacccggtgctttaaagcgttctactttggaacgccatatctacaaggccggttacggccaaaagcagatgcagatgtaccaggatgcaaggaacagttcttccaaacgtttctgcaaaccacaccgcatgatgctgatccaggcggatatcaagtatggtcccaagcttccgattggaagaaatggagccaaggtacagacttacctgtcctcggcaatcgatgaccactccagataccttttatcttcccggttctatgataatcaggaagaagcaatcattgaagatacgttccatcaggcggtttcccggtatggaaccttcgatgcctgttactttgataatgggacacagtatatcgcaaaacagatccggtcttcccttgcaaggttgggcatccgtgtgatgtatgcaaaaccaagatccggtaaaagcaaagggaagatcgagaagttccatcaggtagtagatgcttttatccgggaatcaaagctgaaaaacatcaaaacactggaggaactgaaccgcctatgggccatctatctggatgagtattaccacaagaaaaagcatgatggcatcgcagaatactatgaaagccttggcgctgccgttccggaagaagggatctcaccgcttcaggaatggaaccgggacagccgcccactgacttttttggatacagccgttgtagccgaagctttcctgcatcatgagcagaggaaagtggataaaggtgcctgtatcagtttccgcgggcaaaggtatgaaaccaagccggccttgatcgggtatacggtagaaatctcctatgatccggcaaatcctgagatcatcaccatttctcatcccggatttgaaccttttcaggcaatgcctgtaaagattggggcgtattgcgatagacacgctacgctcccagctgctatgcaggaacaaaaaccgacaacttcccgttttctggatgctttggaaacgaagcatacccagagcaggcgccaaatggcagatgcgatttcatttgcttcctacaggaaggaggtgaatggctaatgtatgaatcattctttggcatggaacataccccctttgtccgggacgtccctcccgaaaaactgtttgaatccaatgctttccgggaaactctcggtcgtctggcttatgtggcggaccgccagatgtttgctgttgtaacagctgattcagggtgtggaaagtcaacgcttatccgccggttttattcggaacttccaaaagaggattacatcatcctttatctgtcagactcaaaactgaccccaaggtggttctataaaggtttgctggatcagttggggctggaatcccgtttctaccgcggtgattcaaagcgtcagctgcaacaggagatcgaggtaatccggggcgtacagcgtaaaaaagttgtctgcatcctggatgaagcccacctgttagagaaggagacgctggaagaattccgctttttgctcaattaccggtttgattccatgagtcccatggcgcttgttttagttgggcagacagaactgtgggaaaataaactaaagctacagcggtatgccgccatccggcagcgcattgacatgtactgtacgctgcctcatcttgaccgttctgaaacagaacaatatatcgcaagccacatggattactccggatgcgggcaggaaatatttacaaccaaggcattggatgagatccataaggcatctgcaggaatcccacggatgatcaaccgtgtctgtgaaaaagctttgatgtatgcgtttcaaaatcagaaacgattgatcgatgattatatgatcaagttcgttgtggaacacgagatgcttgggatggtaacttcataaagcaggtaccgcctggaaacaggcggtattgcctaactgactggtgacagaaagttaagcaagtgagcgtcaactgatgtgagcaatctggtgacagctcatgaaatcactaacatgttatcatggacatggtattgtaattaatgcagagaaaataggaaaaaatttgtctatatggcaaggtgtaacgattggaaaaaatataaatagtgaacaattacctataattggtgataatgtgaaaataggagcaggcgcagttgttatgaaagatgttccaagtgatagtgttgttattggtaatccttgtgttatcaaaaagcgatgagtctgagaattaagtttcgagggtacaccagactaacagagtcccttttttgcttattaagttacgagcataggtgtgtatttatacagagtataaagaaaatatatgtaatagagaccgggactcagaaagacccggtctctattacatataaaagtttattatgaagatggcataattataacgcagacgattaacttaacatcatacggtcatttgcgaattctccgccgctgacttcttcgaattttgcaagaaggtcagataccttaaggtttttcttttcttcaccggatatatcgtagatgactcttccttcgtgcatcatgatcaggcggttgccgtgtgcaatggcgtctttcatgttatgtgttaccatcatggctgtcaggttattttcactgatgatcttgtcggagagtgcaagtacttttgcagcagtctttggatcaagagcggccgtatgctcatcaaggagcagaagtttcggctttttaagggaagccatcagaagtgtgatcgcctgacgctgtccgccggagaggagaccaaccttactgcttaagcggtcttcaagtccaagatcaagttcttttaacgcttctctatagtgttcacgttctttctttgtaacgccccagccaagacctcttttctgaccgcggcgtgcagcgatggccatattttcttcaatagacatcgttgctgcggttcctgtcataggatcctggaacacacgaccaaggaagagtgcacgtttatgttcggaaagttttgtgatgtcagtaccgtcgataatgatatttcctttatcgattccccacacacctgcaatcgcattcagtgttgtagattttcctgctccgttacctccgatgatcgttacaaaatcgcctggatttaagttgaggttaactccgttgagggcacgtttttcattgattgtgccggcgttaaatgtcttataaatatctttgatttctaacatgtatcccattattttgcccgtcctttcttgaagtaagtatctttcatataaggaactgcgaggaagcatgcaacaactacagctgagaacagtttcatataatcagatggcatcttcagccagagtactaatgcgattacaaggtagtaaaggattgctccgatgaagactgcaccgagtgtgaaggcaaaagctgcttttctgtgtgcacagaattttccgaagatcacttcgctgatgatgacggctgcaagtccgataacgatcgcgccacgtcccatattgacatcagctgcgccctggtactgtgcgtagattccaccgcaaagtcctacaagaccgttggagatcataagtgcaagaactttgttgaatcctgtgttgatgccctgagcacgagccatctgttcgttacatcctgtcgcacggatggatgcaccgagttctgttccgaagaaccagtagcagagtgcgatcagaatcagtgctgcaaggattaatttcaggaagaagatccagttgccttctccggttacataacgaagagaagcaaccagtttgtactgcatgacattgactgcctggttggattttcccataatgccaaggtttacggagtaaagtccgatctgtgtcaggatacttgccagaattccaggaattccgaaaaatgtatgtaagactcctgttacaaatcctgctgccatacctgcaagaaatgcaaagacaagtgcaagtgcaggattcacacctgcgcggatgagcataactgcgactgcacctccggttgcaagtgaaccgtctacggtcagatccgcaaagtcaagtatacgaaatgtaatgtaaacaccgagtgccataattccccagataatgccctgggccacgttgcccgggagagcacgtaccagagtcattggatcaagggctgcgaaatatgctgccatgatttatccctctaatctttctttttattgtttcatataaatagataattccatcaccgaaggtgatttggaatgaattttgaccaagttgctgtgaacggagtgaacagtaactagaatcaagagcgaccattcatctggatgaagcccgctcttgagaaaaatatgttctgtttaatatcttctgattaatatgttccggttggatggaagaatcttattcttcgattgcctcatatccgtctggaatagtaattccaagttcctcacagatggtaggattgtacatctttgttacattcggggcactttcaatcttcattgtagtaatgtcagcaccgtttacaaggatgtcgtaagccatctcaccggctttgtatccgatatcgtagtagctgatagaaagtgttgcaataccgcatcctttacagattccctgctcaccggcgattacaggaaccttagccggcagacagatgttattgatgatttctgtgtttgaagccattgtgttatctgtaggaatgtaaagtgcatcacattcggaaactgcatttgttacaacagactgaatctcattagaatcagcagctgtgtactctttgtatgcgattccatctttctctaatgcttcagcgaaaagctttgcctgatatgctgagttcggttcagcggagcagtagagaagtccgactgttttagcatcaggaatgagttctttcagcattgcctcctgctcatcaatcggtgcaagatcgcttgttccggaaatgttcatgtctgttgttcctgtccagtcagagatatcaagtgctgtagcatagtctgtaacagatgttccgagaatcgggatatcacttgttgctgcgcttgcacactggagtgctgttgttgcatttgcaagaatcagatccacattatccgctacgaagttatttgcgattgtagcacagttagcctgctcgccctggccgttctgaaggtcgaatttgacattgccttctccgaacttttctgtacaggcatcttcaaatccttttgttgcttcgtcaagagcagcatgctctaactgctgtaagataccgatcttataagtctttcctgaatcggatccgttgtctgcgctcttatctgtagagtcggatgaacttccgcaagctgcaagtgaaagtgtcattccggcagccataagtactgctaaaattttcttagatttcatgattgtgtcctccctttttcgattcatacaatccacgctttaaaccgttacgctttaaagcactaaactgtaagatgtcatgtgataaattatagcacgattatttgatacgtcaagtgaaaatggaacaaaaatgcaagattcttgcaaaaaatgttgcaaaaaaacaatgctttattcgtctggaaaattgtgatattataagatatggtataaaattaagaatcatgaaagtctttcttctataatatggggatttttgctgcaaagaaattaacagaaggatttttatggaattgaataaaggagtttatttttatagatgaagaaaaagcacgaacacatcatagaaagtgtgaggccaggaagcattgcggaagagcttggaattgaaccgggagatgttctgctggagattgacggtcaggtgatcgaggatatttttgactatcagttttatgtggaatctgaggagctgcttgttgtgatccgaaaagcgaacggggaagaatgggagcttgaaattgagaaagatgttgatgaggatctgggaattgatttcggtaagggactgatggatgagtatcattcctgccataataaatgtattttctgctttatcgatcagatgccgccggggatgcgtgatacgctctattttaaggatgatgattccagactgtcattccttcagggaaactatgtcacactgacaaatatgagtgagaaggatatgaatcgtattgtccgttatagactggaaccgatcaatatttcgttccagacgacgaatccggagcttcgttgtaagatgcttcataaccgttttgcaggggatgctttgaagaaagttgatatcctgtatcagggcggcattgagatgaacggacagattgttctttgccgtggagtgaatgacggggaagaattggaacggagtattcgtgacttgacgcagtatctgccgcttttacgcagtgtgtcggttgtgccggttggactttccaagtatcgagatggattgtatccattagagccatttacaaaggaagaggcgaaggaagtcattcacacgattgagaagtggcagaagaaagtctacgcagaatacgggatccattttattcatgcaggagatgagtggtatctgctggcagaggaagaagttccggaagaggaacgttatgatggctatcttcagctggagaatggagttggaatgcttcgtcttttatttaatgagtttgaagaaggttatgcgaagctggaaagcggagaacatcaggaagagatttcccttgcaacggcaaagcttgcatatccttatcttgagcgtatggcgaagaagatggaagagaagtatgagggacttaaggttcacacatattgtatccggaatgatttcttcggagagcgtatcacagtctctggtttgatcacaggacaggatctgatgaagcagttaaaagatcagccgcttggaagcaggcttctgatcccatgcaatatgctgaagatggacgaggacattttccttgatgactttacattgaaagaagtatcagatactttacaagttcctatagatattgtaaaatcaagcggacaggatctgatcgatgctattttaggtgtcgcaggtccgaatcccacagatatagatgagaatcagatgaaagaccgtaggatcactacggcttaagagaaactatttaagagaaaataagagaaaacaggaaggtaagaatagaatgagtaaaccagtagttgccattgtagggcgcccgaatgtgggtaaatcaacacttttcaatgtcctggcaggagagatgatctccatcgttaaggatacaccgggtgttacaagagacagaatttatgcagatgttgactggcttgacagagagttcacactgatcgacacaggtggtattgagccggacagcagtgatatcattctctcccagatgagagagcaggctcagatcgccattgacacagcagatgttattatctttatcacagatgtaaagcagggacttgtggattcagattctaaggttgcggatatgcttcgccgctccggtaagccggttgtccttgttgtaaataaggttgacaattttgataaatatatggctgatgtctatgaattctacaatctcggaatcggagatccggtgccgatctcagcagcatccagacttggtcttggagatatgcttgatgcggttgcagcacatttcccggagtgggatccatcagaagaggatgatgaccgtccgcgtatcgcaatcgtaggtaaaccaaatgttggtaaatcctctatcataaaccgtctgcttggtgagaaccgcgtaattgtatccaatatcgcaggtacaacaagagatgcgattgatacagagatcgtgcatgacggaaaggaatacatttttatcgacacagcaggtcttcgtagaaagaataagatcaaggaagaactggagcgttatagtatcatccgtactgtaagtgcagtggagcgtgccgatgttgtccttatggtgatcgatgcgacagaaggtgtcacagaacaggatgcgaagattgccggaatcgctcatgaaagaggcaagggagttatcattgtcgttaataaatgggatgccattgagaagaatgataagacaatgaaagaatacgaaggaaagatccgtcaggtactttcttatatgccatatgcagagatcatgtatgtatctgcactgacaggacagagacttccgaaactgtatgatatgatcgatatggttattgagaaccagacacttcgtattgcgacaggagttctcaatgagatcatgacagaggcagttgctatgcagcagccaccgtcagataaaggtaagagattaaaactctattatattacacaggttgctgttaagccaccgacatttgttatctttgtaaatgacaaggagctgatgcatttctcctatacaagatatcttgagaataagatccgagaggcatttggcttcagaggaacttcactgaagttcttcatccgtgagagaaaggaaaaggatcagtagaatggaacgtattatctgtctggtgattggatatgcctgcggacttctgcagagcggttatctggtcggaaagatgcatcatattgatataagaaaagcaggaagcggaaattccggttcgacgaatgcactgcgtgttatgggattgaaagcaggacttatgacattcgcaggagatgtgttgaagtgttttgcagcagtgctcattgtccgtgcaatatatcatggaagtaatattcttccgcttctgatgatgtatgcaggagcaggagttactttgggacataacttcccattttatatgaattttaaaggtgggaagggaatcgctgttatggcagcacttgtggtaagcaactgtttctggtatctgccatacagttccatcctgttttttgtcacactggcattctttcttgtgccggtgcttgtgacaagatatgtttcccttggttcattgcttgcttatgcagtgttttttatccagatggtgatcttcggacagcttggatggtttgatatggcgaagggtgcggtatatgagttatatgtgatcacgttcttacttacagcacttgcatggtacagacaccgcgccaatattaaacgtctgttgaatggaacagagaataaattcggttcaaagaaataaaagaagcgaagaaaaggagagatgatatggcaaaagtaggagttcttggggcaggaagctggggaacagccctggcaatccttcttcatgataatggacatgatgtaactgtctggtcgatcgatccgaaagaagtggagatgttgagcgagaagcgggagcatgtatcaaaacttccgggtgtccatatttcagaagagattatgatcacaaatgagatggaagaggctattaaaggaaaagattttttagttcttgcagttccttctatctttacaaggagtacagcggcaaagatgaagccgtatgttgttgatgggcagatgatcgttgatgtagcgaagggaatcgaggaagatacactgatgacgctgtctcagcagatcagccaggagattccgcaggcagacgtagcagtgctcagtggaccgacacatgcagaagaagtaggaagaaagcttccaacatcctgcgtgatcggtgcaaagacaaaaaagacagcagagtacttgcagtccgcatttaacagtaaagtattccgtgtgtatacaagtcctgacatgcttggaatcgagcttggaggttctcttaagaatgtcatcgcacttgcggcaggaattgcagatggtctcggctatggagataatacgaaggctgctctgatcacacgaggtattgttgagatcggaagacttggcgtgaagatgggcggcaagttcgagagcttttgtggacttaccggaatcggtgatctgatcgttacttgtgccagtgttcatagccgtaatcgtaaagccggttacttaatgggacagggcaagtcgatggaagaggctatgaaggaagtaaacatggttgttgaaggtgtttattccgcaaaagctgctgcaaagcttgcacagaaatatgaagtgccaatgccgatcgtagatgagatcaacaaggttctttttgaaggaaaggatccaaaacaggcagtagatgacctgatgcttcgcgagtctaagattgagaactcttctcttctctgggaagaataagagaacgaaacgaatataaaattaaaagtcatacccctttgtctggctgcatacattggtatcagcagaacaagggggtatttttatggattcatttcaggtatacaaagatatgaaagcacggacaaacggagaaatctacatcggagttgtggggccggttcggacaggcaagtcaacgttcatcaggcgttttgcggagcttttgattttgccgaatcttaaggaagagcatgtaaagcagcggacacaagatgaacttcctcaggcagcatcgggaactacgatcatgacaacagagccgaagtttgttccaaaagaagcagcggatgtaaagctttcagatgacatagaggtgaagattcggctggcagactgtgttgggttcatggtggatggagcgaatggccataccgagaatgggcaggagcgtcaggtgaagacaccatggtatgactatgagataccatttacaaaggcagccgagatcggaacacaaaaggtgatacacgatcatgcgacgattggatttgttgtgactacagaaggaagtgtgacagatctgccaagagaaaactatgtggcagcagaagagcggacagtgaaagaacttcgacagattgggaagccatttcttattttattaaattgccagaaaccgtattcgaaagagacagaacgtctgaaatcagctcttgaggagaaatatgcagcacctgtttatccggtgaattgtgaacagctcaaggaagacgacatttatgaaatgatgcgccaggtactgtatgaatttcctgttacggaaatagaattttatattccgaaatgggtggaaatgttgtcatgcgatcacagaatcaaaaaagatctgattgagaatgtgaagaaaattatggctcagatgtcggatctgcgaagtgtctccggaaaagactggaagacagaaagtccatacatagaccagatcctgctggatcaggtagagatggacacaggcaaggttatattgcggatttctttctgccagaagtattattatgaagtgttgagtgagttgacaggaactcagatccgcagtgagtatgaattgatttctctgatgaaagagctttcttctatcaaagaagaattcagtcagatcaaggatgcatttgcggatgtgaagatgaaaggctacggagtagtcagcccgaagaaagaagagattcatctggatgagccggtaatcatcaagcagggaagcagatatggagtaaagatccgttccgaggcaccatcgatccatatgattcgtgcgaatatagaaacggagatcgcaccgatcgtgggaagtgagaaacaggcagaagaccttgttgcatatattaaaaaagagagcgaaggtccacaaggcgtctggggaacaaatattttcggtaaatcaattgaagatcttgtgatggatggtatgcgtaataagattacgctgatcaacgaagaaagtcaggtaaaactgcaggattctatgcagaagatcgtaaacgacagcaatggtggtctggtctgcattattatatagtgatcgtgagctttttttttacaggaaaatatgataagataaacagtaagtaaaatatgcaaaagaaagcgaggaattcagtgttgctgaatcaccaacagagaaagattcttgaattattgtgtaaaacagaacatgtgactgcgagtgaactggccggtcagcttggaattggcgtgaagacggtaagagtcaggatcaaggaactgaatccggagcttgagaagaaaggaatccagattttatcaaagtccaggtacggatattatttggatccaagacagccggaaggtatcgaaggactgctgaatccgaaggagaatgaagatccggtgattccgtcgaataatcaggagagagtacattttctccttgcatatcttctgaacagaacggaatatatcaagtcagaggagttgtgtgatttcctttatatttctaaggggacgttgacgaatacactccggcaggttgaggaaacttatcagaagtatggtattacagttcataagaagccgggatatggtatccgtgtggaaggcagtgaatttaatcttcgtcagtgtatggtggatgtctttgtaaagcaggacagtctggaaggaattggaagacggcatcagacggatgagattgagacactggggaaaatggtctatcagtgtctgaagaaatatgaaatcgaactttctgagattgcttacaatgactttgtggaacatatttatgtggcgatgcgaaggatacgtcaggagaaatatgttgaaccgcaggcagcggatatgcttggaagaaaagagaagcagtttgtggaagaactgacagagctggtgggcacgcattatcagattcgtttttctcaggatgagaagaattatctgacactgcagcttgtggggaaggtttatatcgacagtgagacagaacaggaaaatttcgtgatgcaaagcgagatcgaccgtcttattactgagatgctagagatgatctacagggaattccatgttgatttcaggaatgattttcatctgcgtatggagctgaaccgacatatggttccgtttgtccttcgtatgaaatatcatatgatcctgcgaaacccgatgctggaagagatccgtaagaattatgtgctttcttatacgatggcgtcccaggcggcaattgcactgggggaatattttcagcagtcgatttcagaagatgagattgccggactcgcagaggttcttgaactggctttggagcagcaggagaatgaacagaagaagttttcgattctgatcgtatgtgcatctgggaagacgagttcagaaattctcagatataagtacagcagagaatttaaagagtatattgaaaagatttatgtatgtaatctttatgaactggagaactttccgtttgaaaaagtggattatgtatttacaacggtacatatctcttcttatgtaccggtaccgattttggagattggttcctttctgcaggacaatgacattgacagggtgagaaagctttttgtaagagagagtaaggattttctgcagaaatattttaagaaggaattattttttacggatgtggaaggaaagacgaaggatgaggttctgaagaacctgtgccggaaggttgagcaggagaagggacttccggagacattcactgcatctgttttgaagagagaggaacttacaccaacagattatggtaatctggtggcacttccacacccggagcgtgccttccaggagcgtgcttttgttgcagtggcagttctgaaagaaccgatattctggttccgacagaaggtgcaggtcgtatttttgacggcgatcggaagggaagaggatgagaatctgcagcagttctatgaggcaacgacagatctgatccttcgtccggcagatgtgcagaatctgattcgtcatccggattatgacaggttgatccagttattgcgcagagcagaagaataaaatgtatttaatctccttaatgaatgtgattatatgttcagtgattcaaaagtgaccacattgattgtggtcattttttgagtggagctttttaaaaatatatgttaaattaaggtcagtcgagggacaggaaaggaaatgacgatgagacatctaacattgatctgtatggcaggtatttcaacgagcctcttagtgaataagatgaaacggctgattcggaatgagaatcttgagatcgcagtcacagcgatgtcggaacgtgcatttcagagttacacaggtcagacagatgttctgctgcttggtccgcagctgggacatcggttcgaaagcctgaaagaacagtatgagtccaaaggcatccgcatagacaggattgatccggagcgtttcggagcaatggatgcgaaggctgtactggagcaggcatttccagacctgtctggacaaataggtgataaataaaataaattaaagataggagaatgtatcatggcaaaatttacttatgtagtacaggacaacgaaggaatccacgcaagaccggcaggaatgcttgcaaaagaagcaaaagctcttgagggagttaaggttacaatcgccggaaacggaaaaacagctgacgctacaagactgatggctatcatggctatgggtatcaaaaaaggtatggaagttgaagtaacagttgaaggtgagaacgaagaagctgcagcagctaagatggaagagttcttcaaagcaaacctgtaagagaaagtcatacatatactcatttaatttctagttaagaaaagatgttttaacagatcaataataaggattagccctccggaagaaagatctgtcaggacatctttttgtttttattgataaaacgctccgcttaggatgcgcactgcggcgtataatgtaggcgtcgcaagcgactgccgcaggcgcaagaatgtgccgaggcacattctttgttctagttgcacaaaagtttattgttctgtataatgagaaagtacgagtggagatcatagtagaattaagaaaggggcagacagaagatgagagcggttattttatcattagatacaggggcatataaagcaaaagcggatgtggcagcggcagcatcactcaaaagaatgctggagcaggttgggattgaagtccgggcagcaaaagcatttccagaggataaagaaatgttgaaaacagtgctctgtaagctggcagatgcgggaatggttgaactggttctgacaaccggagcagttggattcctggagaagcattgtgcgccggatgctgtgagggagacagcagaccgtctgcttccaggtattccggaagcactcagggcttataatcttcgtcatacaaagaaagtgattctggatcgttcagaggctggaatcagaaagaagacattgatgatcaatttgccggagagtgccaagatggcaaaggaagatctggaatatatacttccagaagtggtacaggtggtagatactttttcattaagataaaaacagaaggatggaataacaggagagattgaaaatgctggtaaaaatatatacagatggtgcagcgcgcggaaacccggacggaccgggcggatatggaacagtgcttgagtatgtcgacacgaagggacagcttcataagaaggaattgtcccagggatatgagaagacaacgaataacagaatggagctgatggctgtaattgcaggtctggaggctttaaaccgtccctgtgaagtagaagtctattcggattcacaatatgttgtgaatgcgtttaaccagcactgggtagacggctggatcaagaagggatggaaacgcgggaagaatgaaccggtgaagaatgtagacctttggaaacgtctgttagaagcaaagcagaaacacagtgtgacatttcactgggtaaaggggcatgatggacatccgcagaatgaaagatgcgatgaacttgcaacaactgctgcagacggaacgaatcttatcgtagacgaagggctgtaagaatctgaaaatgacgattgattaataaaaatcaagaagaaaatcttgaaaacagtggacaacagagggatttcttagtataattgaaaactgtgttgagtaagacagacaatcgcggctgcaagtgccgaaaggccgcaggtgaggaaagtccgggcttcatagggcaggatgccggataacgtccggtggaggtaactcccaggccagtgcaacagaaataaaccgcctgtgcattttgtgcaggtaagggtggaaaggcagtgtaagagactaccgccttgctggtaacaggaagggcacatgtaaaccccatccgaagcaagaccgaatataagcaatgtggctgcccgtcacgcttaaggtgggtcgcttgagcgcagcggtaacgcggcgcctagatagatgattgttcaacgacataacccggcttatcgttttgctcaatcaatggagggagtttctgtttagaaactccttttgtatttttagctataataatgcggaagaagttatattttagatagattcttttgcaagagacagacaacggaggaattaagacatgggaatgaaaattaatgcagaattaccattacctgcagacctgaaggcggaatacccgcttccgaaagaactggcagagatcaagaagaaacgtgatgcggagattcgggagatttttgaaggaaaatccgataaatttgttgttatcgtgggaccatgttccgcagataatgaagattctgtgtgcgactatgtgaatcgtcttgcaaaagtgaacgagaaggtatcagaccgtctgatgattattcctcgtatttatacaaacaaaccacgtacaacaggagaaggatataagggaatgctccatcagccggatccggatcaggcaccaaaccttcttgagggtatcattgcaatccgcagaatgcatatccgcgcgatcaaagagacaggactgacatccgcagacgagatgctttatccggagaacagaagctatcttgacgatatcctttcttatgaggcaatcggtgcccgttcggtagagaaccagcagcaccgtctgacagccagtggaatggacattccggttggtatgaagaacccgaccagtggagacttttcagttatgatgaactccgtaattgctgctcagaactctcataacttcatttacagaggaatggatgttacaacagaaggaaatgatcttgcacatgtaattcttcgtggtggtgttgacaaatatggaacctgtattccgaactaccattatgaggatcttgtccgtctggtagatgtttatgcgaagaaagacctgaaaaacccggcagcgatcattgatgcgaaccattccaactccaataagcagttcaaagaacaaattcgtattgtcagcgaaattcttcacagcagaagatacaatgatgatgtgaagaagatggtcaagggagttatgatcgaaagttatatcgaagaaggaaatcagaagatctgcgatcatatgacttacggaaaatctattacagatccatgtctgggatgggaagatacagagaagctgatttacaaaattgcagaagagtgttaaatttataagagccaggacagataccacacacggtaactgttctggctcttatattagatgtgggagtcaatcccacatctgatatagataaacgatggattatctgcggctatatttctcctcgcagtactggcatctgtatacctgattctcttcatcagtcagtacaaatacatgatcaagtccctgctcgatagatgtgatacatcttgggttcttgcagcggatcacatttttgatcttcttaggaagagtcagaggtttcttggagatgatctctccgttttcaataatatttacagtaatgttgtgatcgatgaatccgagaatatcaagatccatgaaatcgatcgggcattcaatcttcatgatatcttttttgcccattttattactttttgcatttttgatgatggcaacacagcagtctaatttatccaggtgaaggtatttataaatctccatgcttttgccggcttcaatgtggtcaagaacgaatccttcagcgatacgtcctacagttaatgtattttctaacattttgttacccctttcgtactatgaaatatgattatattagtcaacgtgaatatccaaaagtgtaaggatcagagccatacgtacatatactccgtactgaacctgacggaaataagcagcacgtggatcgtcatcaacatcaacagagatttcatttacacgcggaagcggatgaagaatatacatatcttccggagcgagtttcattttctctttgtcgagaatgtagaagtctttcatacgtacgtagtcttcttcattgaagaaacgttctttctgaacacgtgtcatgtacagaatatcaagttttggcattgcttcttccagacgtacaacttcttcgtaaggaatgttcatcttgtcaagtacatcatgacggatgtattccggaagtcttaattcttctggagagatcagcacaaaacggatgcctgtgtatctcacgagtgctgtgatcagtgagtgaacagtacgaccgaattttaagtcaccacacagaccgattgtcatgttgtcaagtcttccttttacgttaaggattgtgagaaggtctgtcagtgtctgtgtcgggtgctggtgtccaccgtctcctgcgttgatcaccggaattttagaatgctggcaggcaaccatcggagcaccttcctttgggtgtctcattgcacagatatctgcgtagcaggagattgtacggattgtatcagatacactttctccttttgaagcagaactggagcttgcggaagagaatcccataacgcttcctccaaggttcagcattgcggcttcatggcttaaacgtgtacgagtacttggctcatagaataaagtcgcaagtttctttccgtcgcaggcatgtgcgtatttgtcaggatgtgcctcaatatcctgcgcaagtttcaacagttcgtccagttcttccactgagaagtccagtgggctcattaaatgtctcataagtaacctccttgtgtgattgaatcacattatttatattctagtagatcagtaacggcttttctcttaggtgcttgcggatcatcatccggccagccgactgcaatcagagctgccagttccctctctggcggaatctctaaaagttctgtaattttttcttcatcaaagatgcccatgatcacagtaccaagtccctgttcttttgcagcaagacagaaagactggcaggcaacaccaacgtcaaacatctgccatctgtctcccttttttgtgctgtaggatccgtcacgttcaaaaccggatctgcctttgataaaagtaacagcaaccagcataggaatttgacggataatattagaattgtaaacaggggtataatcatcagcgatctttttgagaatagaggggtcttcaattgcaatataacgagtgatctgtgtgtttttccaagacggagaataggaagcaatagaaataatagaatcaataatagaatgatcaatatgatcaggtttatattttcttatgcttctgcgcatcttgatacaatcagaaacgttcatttgtatacctcccaatgttttattcgagacgcttgaatcagataaaaaccgattgttctcgtattccataccatgatatactaaaacgagaagattttcaacaggaaaataaacttttttcaaaggatagattttgtggaaaaaatgtattatacttggtactgttcatgcagtgtttttactataattaattgtgttacaaatcagtataaaagagatgcagtatggatggagttttttagtaaggagaagttaggatggcaacacttgaagaactgagagtagagctcgacaagatagataaccagatggtggaactttatcagaagagaatgaatgtctgccgtgaagttggagattataaggtgaaagccggacgtaaagtgtatgaccggcagcgggagcaggagaaacttgcagatgtggcatcaaaggttgacaatgattttgataagaacggggttcgtgaattatatacgcagctgatgtctatgagcagaaaactgcagtatcagaagctggtagaagcaggcgcacttggaaggcttccttttattcagattgattctcttgagaaggatactgccagagttgtgttccagggaacagaaggtgcttacggagaagcggcaatgcatcagttctttggagaagatgtgaattgctttcatgtaagaacattccgtgatgcgatgactgcgattgaagaaggtgctgcggattatgcggttcttccgattgaaaattcatctgcaggtccggtgaacgagatgtatgatcttctggatgaatttgagaattatattgttgctgagacgatccttccggtagtgcataccttgtcaggacttccgggaacaacacttacagatatcaaacgtgtttattcgaaagcagaagcccttatgcaaacgacagggtttttgaatgaccatgcagaatggcagcagatcagtgtagtgaatacggcaatcgctgcgcagaaggtagtaaaagatggagataaggcacaggcagctgtatgtagtgcctatgcggcgaagattcatgggttggaagttctcgcagataatataaatgacgagccggataactgtacacgctttatcgtggtgacgaatcagaaggtttatctgaagcatgcgtcaaagatcagtattgaattcgaacttccgcatcagagtggggctcagagtgggtctctttatgatcttctgtcacattttgtatacaataatataaatatgacaaagattgaatcaagacctgtgaaaggaaaacagtgggaatatcgtttctttgtagattttgatggaagtctggaggatgcagcagtgaagaatgcattgcgtggactgagggaagaagcaacgaatttgagaattcttggaaattactagatattagaatagatagaaaagcagaatacagagcaggtggagcgaaagctccagagggatttactggaaaagaggttatttagaatgcgtacaaacgaactgatgctgtataaaaatatggaatatggagagattctaaaggatatcacattcctgattgataattatgagagtgaattttataacaaagaagatttaagaggactcctttttgattgtatcaatgaacttttggaattatcagtaagccacggttttgaagggaatctgtggcatacttatctgacatttcttcttgcgagtgatgagaatgcatacagcacttcctgtgagatcgtaggagagattgaaggtagtctgaatgagattgcacttcatgattttgctatttttaaggaaatgtttgactatgatttcgaggaactggaaaagagtctggacgctgactgcctgaagatcatcatggattataagagcggtaacagtggcggtaaagtgttcaaccgtcgtgtcagggacagaatctgtgatctcagccgtgcccttgctgcaacgcagaacgtagatcatttcaagcgtacactgacgcagttttataaggaatttggagttggtaaacttggacttcacaaggcatttcgtgtggagcatccggagaattctgatgtggagatcataccgatcacaaacattgcccatgtacatcttgatgatcttgtaggttatgaagatgcaaagaaaaagctggttgataacacgaaagcatttgtagaaggaaagaaagcaaataactgtctgatgttcggagatgccggaacaggaaaatcttcctcgatcaaggctattttaaatcagtattatgaccagggacttcgtatgatcgaggtgtataaacatcagttccaggatctgaatgatgtaatcgctcagattaagaatagaaattataaattcattatttatatggatgatctttcttttgaagaatttgaaattgaatacaaatatttgaaggcggtaatcgaaggtggtctggagaagaaaccgaagaatgtgttgatctatgcgacatcaaaccgccgtcatctgatccgtgagacattccgtgataagcaggacagagatgaagatatgcatacaaatgatacagtacaggagaagctgtcattggttgcaagatttggcgttacgatttatttcggttcaccggataagaaggcattccaggagatcgtgcgtgtacttgcgaaaaagaatggaatcaatatgccggaagagcagctgcttcttgaggcgaatgcatgggaactgtctcatggcggtttgtctggaagaacagcacagcagtttattgattatttggcaggacgggagtaatgcattgtgtggaaggcttttagagtcaaacagagcttggaaaatggaataacagaagaaaaaaacaagagtggatttcgcaaaaagatgatatctgtacagttactgatcgtacttgttgcggttatgctgttttgttctggatgtgccgggaagatgaatgcaaagaagatttttcgtcagtcttcggaaaatatgcagaaagtaacttcttcagcaaaccatgtggaactggcaattcagatgtctgatattttaaatctgatggaagtaaacatggagatggatctggagaacacgacagagccgccggccggtcatgcgaaaggaactgccagggtgacaatcaaagattctgaggtatctgcagatctggaactttatcaggtggaggaagacggaaaacaagtgacatatagtggcacgaatggatcctggaagaaagagagtgcagaaggaagcaacgagaatcaccttggtattgacggaaatatttttgcgcaggaagggaaagcgcttgagtctttccacctgtccgagcaggagacaacagtaaatggcaaggcatgttatcagttgtatggcaatgtaacaggaacggagcttatgggtcttcttggcaaagagatggtagaagcatatcatctggtgaatctcccggaggaggatgcaatccgtaatttgaaaatccctgttatttttgacatttacaaagaagaactgcttccggcgaagatcgttgtagacatgagtgatgtaatgggagatttatataagtcttacggagagactacgaaagtaaatctttactcgatcgtgcttcagtttacggactataacaaggtggatgaaattcatgttccggatgaaataaagaattctgcgaaataaaagaaacgttgccagaaatcctgtggttgatgctatataaaaagaaggaagcttcagaccgggcacatgccgctgaagtcttccttctttttgttattaccacttatttcatattatacaggtttcatattactcaagttcttctatattactgatatcgctgtcaatcaccatggagtaatttgtataatagacgacaaatccaggtttcccaccatttggttttttgacctgttttttctccacgtagtcaatctcaactttatcggaaccacgcatgctggaataataagctgcaagtctggctgcttcttcgaatgtacggtccggaagttcatccccatgtgttttgacaatgacatgggatcctggagcttgttttgcatggaaccaccagtcatttccgactgcaaagtggaatgtcagttcttcattctgaagattgttctttccgacatacatatgataaccgtcactggaaatgtaatggagtggtttgtttttgatcttgacttttttctttgtatattttctgcggatgtagccggagtttgtgagctcttctttgatttcggcaagatcatcttctgtcagtgcaatatcaagtgccgtctgaatggattccagataagtgatctcgtccaatgtctctttgcaaagaacagaaagtgcttcaaaagtacgtttttgcttgttatattttgcaaaataacgctgggaattctcctgcggtgtctttaatggatccatcggaatggataccatttcattggtgtaatagttcaggcattcaagagtctttgcaccttcctccagattgtatccataagtgttgatcaattcgccgtacactttaaatttttcacgattttctgtgtctttcaactgacgcagctgcaagtcgtattttttccggtttcgttctaatgcagtctgaactacgtgacgcagatcaaccgatttctgtcggatgcgggtaatgagactgcgtgtcgaataataagtctcaagtacttcggaaacagaatcatattctacccttgtatagttgacaaaatgactcagtggaagagcagagaattcttttggctcttttccatcgaaataaataccaggtgaaaaggtatcttctttgatcgcggataaataaatttcaaactgtgtatatagatgaagtaagatatcagcagaatattcctgggccgggacagaagaatccattcctgcaagggagcagatctcctccgcggttacaggactgattccggtaaaacttgtataaattgctttggcaagtggcattggtttacctgtcagatgtgctgcgaattcttcagaagttaccgtgagcggatctgctttctgcatggtgtccgggatgaaatactctcttcccggaagaacttcccggacagaactcatctgtgcagatacatgtttgatactgtcaatgatcttaccctgatcgttacagaaaatgatattgctgtgttttcccatgatctcgacgatcagatctttccggcagaggtcaccaagttcatcgagatgttcaattgtaaaatgaataatacgctcaagtcccggctgccagatatcaacaatgcggccgccgctgatatgtttacgaagaagcatacagaagtttggggcagtcatcggacttggcttattcttcgaggttagatagaccagcggaagagaagcatccgccgaaatcgacagacgatactgaccttccgttgatttgactgtcagaagaagctcatccgcttccggttgtgcaatctttgaaattcttccgtttaataatttatgttttaattcgctggcgagactcgccacaacgattccatcaaaagccatattgtttcctcctgaataaaaggtttgttttcacattttttaattgtaacataaatcgaatctttataaaagacttgttgaccatttacaaacatttgatgtataatagattagattatagtaaacagaggatgaagacaatgatcaaaagtatgacaggctttggcagatgtgagattcagcaggattccaagaagtttaccgttgagttaaagagtgtaaaccaccgttatcttgatgtgaacatcagaatgccgaagaaacttaatttttttgaaacatccatccggacacttctgaagtcttatgcgaaccgcgggaaagttgatatctttattacatatgaagatctgtcacaggcgcagagctctgtgaaatataatccattgatcgcggcagaatatatgaaatattttaagcagatggaagaagaattcgggctggaaaatgacatcagcgtatctgcatttgcaagatttccggaagttcttacgatggaagagcaagtggaagatgaagaggagctttggaatggactgaagaaagcactggaaggggcttttacacagtttgttgagacgagaataacagagggtgagaacctgaagaaagatattcttgcgaagcttacatttctggagcaggaagtcgctgcggtagaagaacgttctccacagattgtggcagaataccgacagaagctggaagagaaagtggctgagttgctggcagatacacagatggaagaaaaccgcctggcagcagaagtgattctgtatgcagataagatctgtacagatgaggaagttgtgcggttgaagagccatattcagcatatgagagcaacattggaggagaaagaaggaatcgggcgtaagctggatttcattgcgcaggagatgaatcgcgaagcaaatacgattttgtctaaagcgaatgatattgaggtttccaatcatgcgatcagtctgaagacagagattgagaagatcagagagcagatacagaatatagaatagagtaaaagagggcaggatcatgaataaaaaaggtattttgattgtcgtatccggattctcaggagccggaaaaggtacattgatgaaagaattaatgagaaaatatccggagaattatgctttatccatctctgcgacaacaagaggtccacgtgacggggaagtagatggcagagaatatttcttcctttccagggagaaatttgaaaaaatgattgccaataatgaattgatagagtatgctaaatacgtggaaaactattatggcacaccgcgtgcatatgttgagaagatgttggatgaagggaaagatgtgattcttgagatcgagattcagggagcactgaaagtgaaagaaaagttcccggatacgcttctgatgtttgtgacaccgccgaatgccagagaactgaagtcccgtctggtaggaagagggacagagacgatggaggttattgagtccagaatgaaccgtgcctgtgaagaggcagagggaatgagtgcttatgactatcttgtcgtgaatgatgaactggatgattgtgttgaagagatgcattctattatccagggagaacaccacagaagttcacgcaatgtgaattttatgaatgacataaaagaagaattggaagagttgaaaggagaaaattaatatgctgcatccatcttatactgacttgatgaaagtagttaacaaagacgttgaagagggagattctaaggttgtaaacagccgttattctatcgtaatggctacatctaagcgtgcaagacagctgatcgccggagaacttccgcttgtacctgtgaaagacggacagaagccgctttccattgcaatcgaagaactgaatgaaggtgagcttaagatcttacctgaggacactgacgaagagtagaatcagaacagtaacggagcagatgcagaaaagtgcaatctgctcttttgacgttgttgttgaacgttttgtacatgcatggaatgtatgaaatgatgcacagaaggtgagatttatttatattttttagagaggatgaccaggaggttttactaatatatgaagatactttttatatccttaggatgtgataaaaatctggtggatacagaagtaatgcttggaatgcttgcttcaagaggttacgagatgacgaatgatgaacaggaggctgatattattgtgatcaacacctgttgttttatccatgatgcgaaagaggaaagcatccagaatattcttgagatggcagaatataagaagaatggcagtgcaaaggcattgatcgttacaggatgtatggcagagcgctatcgtcaggagattcttgatgagattccggaggtagatgaagttcttggaacaactgcatatgatcgcattctggatgcggtagatgcggcacttgcaggacaacatgaagttatgacagctgaccttgatgctcttccattaccggagacgaagcgtcttgtaacaacaggaggacattttgcatatctgaagatcgcagaaggatgtgacaaacattgtacgtactgcatcattccgaaaatccgtggaaactttagaagtgtaccgatggaacgccttctgaaagaagcacaggatctggcagagcagggcgtaaaagaattgattcttgttgctcaggagacaacgctttatggaaaagatctttatggagagaaatctcttccaaagctgctccgtgaactttgcaagatcagtggaatccgttggatccgtattttatattgttatccggaggaaatcacagatgaactgatccaggtaatgaaagaagaaccgaagatctgtcattatcttgatctcccaatccagcatgcgaatgataccatcttgaagagaatgggacgcagaacttcaaaacaggagctgatcaacattgtgcagaagcttcgtaaggaaatcccggatatctgtcttagaacaacactgatcacaggctttccgggagagacgcaggagcagcatgaagaggtgatggaattcattgacacacttgagtttgatcgtcttggagcatttacgtattctccggaggaagatacaccggcagccacattcgaagatcagattgatgaagaagtgaaagaggatcgtcaggcagatatcatggaacttcagcaggaaattgcattcgataaagcggaagacatgattggaagagaagtttttgtcatgatcgaaggtaaagtcgcagatgagaatgcctacgttggaagaacttatcgtgatgcaccgaatgtagacggcctgatctttatcaatactgacgtagaattgatttccggagattttgcaaaggttaaagtgaccggagcattagattatgatttgataggagagttgatgtagtatgaatttaccaaacaaattaacagtattacgtgtgattatggttccgttttttgttttctttatgttgacagatgtaggcggagctgcgaataaatggatcgcgcttgtactttttattgttgcaagtctgacagatatgctggatggtaagattgcaagaaaatacaatcttgtaacaaattttggaaagtttatggatccgctggcagataaacttcttgtctgctcagcaatgatctgtctgattccttcaggaaaacttccgacagcagttgttattgttattattgcaagagagtttattatcagtggtttccgtctggtagcatctgataatggcgttgttatcgcagcaaattactggggaaaattcaagacagtatcccagatggcaatgatcattgttctgattgctgattttggcggtgtattcgacatggttggaacagtactgatctggattgccacagcacttactgtgatttctctggtagactatgtgtgggcaaacagagaggttcttacaaagggaggcatgtaagagatgtatctggagtggttttttaaagagaaagctgcaggtgagaaaagtctggaagaagttgtagtagatcttcttgcagagcgtaaacttcatgtgacaacagcagaatcctgtacaggtggattgattgcaggaacgttagtcaatgtggcaggagcatcagatgtgctgaacgagggatatgttacgtattcgaatgaggcaaaggaacgtctaattcacgtttctcatgagacacttgaaacttacggtgccgtgagtgaacagacagcgcatgagatggctgagggtgctgcaaaggctgcgaatgcggatgcggcactaagtgcaacaggaattgcagggcctggaggtggaacagaagaaaagccggttggtcttgtatatattggatgttatctgaatgggaagacgacagtgaaagagtgtcgttggaatggaagccggatggagaacagactggatactgtgaaagcagcattggagatgctgaaggaacgtctggtggaagagatgccggtgtaataagaaaagattaagttgaagcagtaactgtttccaaaaggatacagaagctgctttttttatacataaatttgtcaagtgtcatatttatataattctttccctcagatggtgaaaatcttgtcaaagttgtgattgacgaatgcgacaaattgtgcgaaaataaatacatatggtgcagggagaaagagtttgtggcaggtgacaaatcaacttctcaccgcgcagacagttcagtgttaaaaaataatgcagagctgtcagtttttgtgcgaaaaaaatagtgtaccgtatacgaagaaaatcatacatattgaaaggagtattaacatgatttattcacacgaagtagaaatgatgtgtccggtagcccagggcgtaaaccatggcgcagctccaattccagaagaagctaaatgggtaaaggcaaaagaaatcaaagatatctccggacttacacacggtgtaggctggtgtgctccacagcagggtacttgtaagctcacactgaacgtaaaagacggaatcatccaggaggcacttgttgagacaatcggatgttcaggaatgacacattctgcagctatggcttctgagatccttccgggaagaacacttcttgaagctctgaatacagaccttgtatgtgatgctatcaacacagctatgagagaactgttccttcagattgtttacggaagaactcagagtgcattctcagaggacggacttccggtaggagcaggacttgaggaccttggaaaaggacttcgttcacaggttggtacaatgtacggaacactgaaaaaaggacctcgttatcttgagatgacagatggttatgtaacaggaatcgcactgaacgaagatgacgagatcatcggatatcagtttgtaaacttcggtaagatgatggacttcatcaaagctggagacgagccggctgtagcgcttgagaaagctaaaggacagtacggacgtgttgacgatgctgttaagatcattgacccaagaaaagagtaaggaggactatttcaatggcattatttgaatcatatgaaagaagagaaaaacagattcttgcaaaactcgctgagtatggaatcaactccatcgaagaagctgcagaagtaactaaagcagctggtcttgacgtttacaagatggttgaaggaattcagccaatttgtttcgagaacgctaagtgggcttacacagtaggtgctgctatcgcaatcaaaaagggatgtacaaaggcagctgatgcagcagcagcaatcggagaaggacttcagtctttctgtattccgggatctgttgcagatcagagaaaagttggtcttggacatggtaaccttggaaaaatgcttcttgaagaagatacagagtgcttcgcattcctggctggacacgagtcattcgcagcagctgagggtgctatcggtatcgctgagaaagcaaacaaagttcgtaaaaaacctctgcgtgttatcctgaacggtcttggaaaggacgctgctcagatcatcgcacgtatcaacggatttacatacgttgagacagaacttgactatcacacaggagaactgaaagaagtattccgtaaagcatactctgaaggacttcgtgcgaaagttaactgctacggagctaacgacgtagtagaaggtgttaagatcatgtggaaagagaatgtagacgtatctatcacaggtaactctacaaaccctacaagattccagcacccagtagcaggaacatataagaaagagcgtatcgaagctggaaagaaatacttctcagttgcttcaggtggtggtacaggacgtacacttcacccagacaacatggcagctggaccggcttcttacggaatgacagatacaatgggacgtatgcactctgatgcacagttcgctggatcttcatctgtaccggctcacgttgagatgatgggacttatcggagcaggaaacaacccgatggttggtatgactgttgctgtagcagttgctgtagaagaagctgcaaaggctggtaaattctaagaatcccagtaaaattaaaggttgaaaatagacaatgttcgcaattcaaagtgttcattgtctattttttatttttcctaaaaatgtgttcatagctacatgtatgaaatgaagagcaacgaaaatataatccataagtattttaatccataaatattacccacaaaaaactgtcttatttcaagatagtttgttataataaaacaatgagttatataggataataaaggaatataagaattaatgattacgaacagtattcattttcagaaatagttaaagtttgaatatatgacgattttgaaattaattttactacaatctagaaaaaacgaggcatcacacatgaagataaagatggtagacattgcaaggcatctcggagtttccaaagcgacagtttcgcttgcggtgaatggaaaacccggtgtgaatgaagaaaccagaagaatggttttggaatgtctggaagaaatgaagaagaataacggagtgatcccggtaaaagagaatatcgttacagtgtctggccatccggtgaatcagatgatcaaaatagtgatcgttaatcacagcaaaggtgctgcatgtaattcagaaacagatctctggtcagatgtacttgctacatttgattctgaagcaagaagacttggatatctttatggagtgacgtatttaaatgatgacattgcgcaaacagaagcagtgattacggaatgtaatatggattttgtggcaggcgttcttctttttggaaccgaattaaaagaagaagatcaaaacctgcttgaaagaatcaaaaaaccattggttctttatgactgtgaacttccagatagtcggtatagtagcgtatgtgcagacaatagacaaatgctaaaaagtgctgtggattatctgtacaaggaaggtgcatcagatatttattatttctgcacagggaaagataattataattatcgagttcgtaaagaagcatttttaaatacaaagtctaacgaagatactgcatctgcaaaacatattcttgatcttggagatgaaattccaaagataacggagactttgttagactggttgagaaaaaatccgcttccgcaaggaattttatttgaaaatcaacagatttcaatcggtgcgttgacggcgcttcgaaagtatggagtgaacatcccacaggaagtgaaagttgtcggatttggtatgattcctgactatatatatcaggatctaaagttggtacaaatgagaatatctgaaatagaaggtgttcttcttacaatggatttactggataaaaagattcgtcagtattcaatgtctaaagttaagatatacacagaagcagaaatgattataagttaaaataatcgtaagacaaaagaacaagatgaacaaaaagagtttttggattgtgtgaaaattcacaagattcagaaactctttttgattattcgcataattatattgatttgtaagagaattagttgtaaaaatcataaaaatacaacaccataattattaaaaaactggtataatataatagtgaaaaatttatcaatttcaatctgcagcgagatgataaaagaacgggaaaagaaaacaaattggaggaacagaaaatgaatgaatattttccacatttatttgaaccaattaagattgggaagacaacggtaaagaacagaatctttatgccgccgatttccacaaacatggcagataaaggctatgtgacagatgcgctggttgagcattattcagccagggcgaagggtggagtcggactgatcgttacagaagttacaacggtagagccggtatatacatacttgccgggagatatgtcaatctatgatgattcttatattccgggatggaagaaactggtagatgcagtgcatcagtatgatacgaagatcttagcacagttattccatccggcttatatggcattcccaattccgggaacgcctcagctgatcgcaccgtccaatgtcggtccttattatgcaaaatcagcaccgagagcagtaacagtagaagaactgcatgtacttgttcagcagttcggagaggctgcacgccgtttccagatcgcaggcggagacggagtcgagattcagtgtgcacatgcgcatggactgctcggtggattccttacaccactttataataagagaacagatgagtacggcggagacattaacggacgtctcagactgacacttgaagtaattgcaaagatccgtgaactttgtggtgatgatttcattattgatgttcgtatttcaggagatgagtacagtgaaggtggtctgacactgaacgacatgatctatgtatccaaacagcttgagaaaacaggtgttgatttcatccatgtttccggaggaaatacaatcaagagaggaagttccatgcctgcacctggtacatcaccagcaccgcatgcacacgcaagtgaggagatcagaaagcatgtgaacattccggtatctacagttgcaagaatcaatgaaccatgggtagcggaagaacttatcgcaaacggaaagacagatatctgtatgatcggtcgtccgaacctgtgtgacagtgaatttgttaataaagctgcagaaggaaaaacagatgatatccgtccatgtatcggatgtggacgttgcctgacaggaatcatgtttggtaatccgatcagctgtacagtgaatccatctgtagagtctgacgagatcaaagaagcagatgagaagaagaaagttcttgtgatcggtgcaggtccggcaggaatggaagcggcttatgttgccaagaaacgcggacatgaagttattctctgcgaaaaaagcggagagttcggaggtcttttaagacttgcagcagtcccaatcgctaagcaggaactttgtaaagtgattaaattcatggcacgtcgtctgagaaatgaaggaattgaagttcgtatgaactgcgaagtaacaccggaaatgcttgtgggagaatttaaggattatgaggttgtctgttctacaggagcagttccgaaagaaatccctccattcaaagtatttaagcagacaatgacagccgatgacgttcttgccggaagaaaatatccgggaagaaagattgttattcttggaggcggatcggtcggatgtgagacagcagattatcttgcaccactgattgatgacatgttccctgcaaaccgtgacattacagtgatcgagatgacgccatcactgatgccgggtgaaggcggagcagctaagagtcagctgacaatgagactcaagagaaaaggtgtaaagattgaactgaacagtcaggtgacaaaggttgatgagactacgatcacttatgagaaagacggacaggaatatcatatcacagatgcggatacactgatctttgcagtcggttatgcaccgaacaaggtagagactacagaagagagagttcattttatcggagactgtgataaagtcggaactctgaaagatgcaattgctgcaggacataaacttgcagaagaattataattgctaaaagaggtgtcggcaaatgctgacaaaaattatgcatgaagtctcaagtatgttaatttgaaagacattaaaaataaagcagaacggagaaaaaagatggggaataaattatcagaaccaattaaagttggaaatcttacttttaaaaacagaatcatgtttccaccacttacaacaggttatgaagaaagagacggatcgataggggcgagaagtctgaatttctatgaaagacttgcgaaaggtggagcagcgtatgttgttatcggagatgtagctcctgtaagaacagcttcaccgacaccaaagctttatgatgacagccagattccggtatataaaaatctggcagacacattacataagtatgactgtaagcttgcacttcagttattccatccggagtatgatgttcctggagttggccgcatgatcatggaggcaggtattgcaagacaggctgcggcaaaagcacaggcagagggaaatgcggaagaagcaaagaaacagatggaagaatgcgacagacttacgaaaggcgcttatgcaaaacttcatcatgatatgcagcattttgtaacagaggcaacggttgagcagttagaagatattaaaaacagtatcgctgcatgtgcagtaaaggcgcagaaagcaggaatcgatgcgattgaagtacatggagatcgtctccttggttccctttgttcaaaaattctgaaccatagagaagatcagtatggaggaagtcttgagaaccgtacaagatatgcactcgaagtagtagcagcaatcaaagaagctgcaccggatcttatgattgagtataaactgccaatcattacagtaaatcctgatggatcacttcgtggaaaaggcggacttgaggcagaagaaggaatccggtttgcaaagatgcttgatgaagctggaatcgatatgattcaggttgctcaggcgaaccatacaggaaacatgggagatacaattccgccaatgggagatgttccatataactggactcttccggttgccagagaagtgaaaaaactggtatctgttccggttgcaacagttggtcgtgttgtcagcttagaagcaggagagaagatcctcgaagacggagatgccgatatcgtagcttatggacgttccatgcttgcagatgcagatattgccaataaagctatatccggagagtgcatcagagaatgcttgaactgtaataaaggatgcgtagatgcaattcagggacgtaaatacatttcctgcgtattaaatgcagagaacggaaacgaaggaactatatttatcaaacctgcagacgagaagaaaaaggttgcagttgtaggtgccggaatcgccggacttgaggcagcaagagttgcagcaaaacgtggacatgaagtaaccgtatttgagaaatcagataagattggtggacagattcatttggcagcagttccgccaagaaagagcgagattttaagatctattgaatattatgagaagattctaccagaactttctatagatgtgaaattaaatacagaagcagattgtgaagagctgaataagtttgatcatgtaattcttgccatcggtgcgcataacatggatcttccaatgtctgttacagacagcaatgttgtttctgcctgggatgttcttgcaggatgcgaagtgagtggagcatgtgcagtacttggcggaggattagttggaactgaaacagcagaattccttgcacagaaaggtctcaaagtaagcattgtcgagatgctggatcagattgcaacaggagaatccgaaacagtaatgccactgatcaaaaaagactttgaagaacacgatgtaaaagagtatgtgaatacaagagtgaattccatcgagaataatgtgattcatgctgtgaacacaaaagacgagtcagaggttacaattgaagctgatacaattgtgaatgcactcgggtctaagaagaatctctttgacgacagtaagctgacagttccatttgtatatgttggagactgcagcggtgagagaacagcagatatctcagcagcaatccgcagcggatatcaggctggaaatgaaatctgagaatttttaaattttattcagtaagaaaataagtaaaatatagggtgatgctgtaaacagaaaatctgtagacagtatcaccctgtttcagttataataaaataaaatttttgttataaaaaatgataatggagcaagactatgataaacaaagaactattttataaagtaacattaattgattgtaacggaaaagaattggaagttgctaaatttctgcagattttaacaggaatggaaaaaacagaaacaagaagaattgtagcaagtttgccgtgtgttttgtatgaagagcttgacggagaggcgtgttcttatattgaggaggcactggatttctatacagcaaaatataagtttgaaccagtcggtgatgaaaaagaagtgtatgaagtagatccatcggtgtatccttcaaaacaggtgatcgcgcttggaagtatggttgattacatcggaaagaggtcagagtttgtaagcatcgcgagaaaatatgacttcccgaagaatgtgagcctgaatgatacgcctttcctggtaaaagacggtttggcagaggggcaggcagtgaaccttcggcaggatcttcacaatatgggaatgtttgcattgatcatgagaagcggggcagaagttcagcaggtgaagaagaggggatttttagcaggggtgtttgcacgttgagatgaataaaagggttgtttgatacagacagctgtgagtagtgattatatagccgatttcttacagaaaattcaattggattttattgacacttttgctgagaaggactacaatatctttagattgttaatttaataacatataaataaggagtttaggaggcagacaaaaatggcaaatattttatgtagtccaagcaaatatgttcaaggtgcaggtgagatgaaaaagctgggtgaatatgctcagaagtatggtaaaaaagcacttgtactgatcacagagtcggggtataaacgtattgaagacgttctcaaagttggatttgaaggatatgatattgaaccagtgtatgagtatttcaacagagaatgtagcaagacagaaattaatcgtttggtagccgttatgaatgaaaagggctgtgatgttgttattggtattggcggaggaaagatccttgatactgcgaaagcagttgcttattacaaagaagtaccggtactgatctgtccgacaattgcatctacagatgcgccatgcagtgcactttctgttatttatactgatgaaggcgtattcgaagaatacttattcctcccagctaatccaaacatggttctgatggacacagaaattattgcaaaatcaccagtcagactgacagtttccggaatgggtgatgcacttgcaacttattttgaagcaagagcctgtcaggctagcgaagcaacaacttgtgctggtggaaatgttactatggcagcgatgtcactcgcaaaactgtgctttgatacattgatgaatgaaggtgtgaaggcaaaacttgctctggaagcaggagcctgcacaaaagctgttgagaaggtaattgaagctaatacattgcttagtggaatcggatttgagagtggcggtcttgcaggagcacatgcaatccataatggattcacagttttggacgagtgtcatcatatgtatcatggagagaaagttgcatttggaacaatcacacagcttgttctggaagacattccggcagaagaactggaagacattatagattggtgcattgaactgggacttcctgttacattaaaagaacttggtattacagaagtgacagacgagaagcttatggcagttgcgacagcagcctgtgcagagaatgatacacttcataacatgccatttgaggtgacacctgagactgtatgcgcagcaattaaggcagcagatgcttacggaagatatttcctgggagaatagaatatgggaaataggacaccatttcgttaaaatagaaaaaccaatttgacaaactgattttctgtggtataattttcatgctgtgaaaaacagccgacagttcatttgtaccttcctgtcgaaaaacaaaaccagggctagttaagaagattctaggctctgcgtgcaaagaagtacgcagagctttttatattattcaggaaatactttcccatatatataaaacgctccgcttaggatacacagctcttaaaaggtacatacatttcaaatacaggagagttgaaatatgtattatttgcaaacaaaagccagttttgacgcagcacattttctctggaaatacgagggaaaatgcagaaatatccacggacatcgttggaatattgtcgcaaaaatcaaaagtcagaagctggagcaagaaggacagacacggggaatggtagtggattttggtaatctgaaaaaggatctgaaaaagctttgtgattcctttgaccatagtttgatttacgaagtgggatctctgaaagcagaaacagtagctgcgcttcagaatgaggactttcatttggagaaagtttcctttcgtcccacagcagaaaattttgcatattatttctacaaaaaattaacggaacttggatacggggttcattgtgtggaagtatatgagacaccgaataattgcgcggtttatgaggaagagtagatgaaagtagtagaaaaattcaccagtattaatggggaaggcacacgggcaggagaattggcagtctttgttcgtttcaaaggatgcaatctgcgatgcagttattgtgatactatgtgggcaaatgaacctgattgccaatataaagaggaaactccggaagagattttaaattatgttttaggaaccggtattcgcaacgtgacacttacaggtggagaaccgttgttgcaaaaagacatcagagaattgatccaccttcttttacaagccggtttacaagtcgaaattgagacaaatggcgcagttgatttatctgcattttgtgaagaacgaccggtatttacaatggattataagttaccgtcaagcgggtgcgaagaatatatgataacagagaacatggaactgctaggaaaggatgatactgtaaagtttgtatgtggcagcaagaaagatctgttaaaagcactggacatgattcagacttataatctgacaaacaggtgtcatgtgtatcttagtcctgtttttggatccatagaaccagtgcagattgtagaatttatgctgaaacatcggttgaatggtgtgcgtctgcagattcagatgcataaagtaatctgggatccaaatgaacggggcgtataaataagtagtgaggtgatggagatgaaagcattagttctctttagtggaggaattgattcaacaacggcattaggactggcaatcaaaaagtacgggaaagagcaggtgattgcactctcggtttcctatggacagaagcacgataaagaaatcagggctgcaatagcagttgccgaatattatggcgtggagcatctgttcctggatttaagcaagatatttcaatatagcaactgttcactgcttcaacagtccacggaagaaattccggaggagagttacgcagagcagatttcaaaaacaaatggcgataagcctgtaagcacatatgtaccgttccgaaatgggttatttctttcttcggcagcaagtatcgcactgagtaaggaatgtggagtgatttattatggagctcatgcagatgattctgccggttttgcttatccggattgttcaccggtattcaatcaggcgatgaatgaagcaatctgggaaggctccggacatcaactgaaaatagaagctccttttgtaaatgtatccaaagtcgaagtagtacggattggattagaactgggagttccgtatgaattgacatggtcctgttacgaaggtggagagaagccttgtggaaaatgcggaacatgcattgatcgcgcagcagcatttcaggcgaatcacgtagaagaccctgcgttgagatagaggaggaagcaatgagagaaaaagaaaatttaacattattgggaaatcagcaaacagaataccgtatggattatgatccgtctgtattggaggcatttcagaataaacatcctgaaaacgattacttcgtcaagttcaactgcccggaattcacaagtctgtgcccaatcaccggacagccagattttgcaacaatcacgatttcctatgttccggacgaacgtcttgtggagagtaaatccttgaaattgtatttgttctcattccgaaaccatggagattttcatgaagatgtgatcaatataattatgaaagatcttgtcaagcttcttgaaccaaaatatatagaagtctggggaaaattccttccacgtggaggtttgtccatcgatccgtattgtaattatggaaagccaggtaccaactgggagcaggttgcctggaatcgtatgagtaatcatgatatgtttccggagaaaattgataatcggtaagataacggagcagaggaaacgtgctttgctgatatcagttacaggagcacatgttatattaatgacaggacgaaaaaccttgatttacaaggagttcgggcctgtcttttctatttcataaaaacatatgggcgaaaatatgatgagaggtgagacggtagttgattgacaacatagcatagatgcagtttatattggaacagatttaccggatgagtatactcattcaaattatacacatattttaaaaggagcaaatgcgaaggcaaaagctaatgccgcacagggattaccagaattgattgaaattgcagccggaaagaaatttactgaaaattataaagaaaaacatactatagatgcaatgtatggttggtatcgttatgagtcaagatttgctttgccagtgtttaatgaagttggggaaattgaaagatataatgtttttaatgtaataatggttattcgacatgcaaaagatggtaaaatgtatctgtatgatataatgaacataaaaaaagaaacgagcacccttttccagtccgaagacattactcagtaaaaaacccatttcttagctacgattgtacccccatagtagcaaaaagtcaataaaaagaaacgaatatattttggaaatcatttcacaattaaataatctacccatcctaattcatgcactttgtttccacagacaaacatatatatgatataatttgagttagtacgttaaatgatattgttgaaattataaacgattacaaaagtatctgttgcaattgagcaagagcttcaccattgtgatgctttttatattagcgtggcatttattaccgaaggtggactggtaccgttaaagcaagtactagctgaattgcgtgataaaggtataccgggaaagatattaacgacaagttatctgacatttacagaaccgccggatgttacgttgattgataaggtacgcaatcagatgcaaaagaatatataaaaatttattataaaggtacattttatggaagttacagttattaaatcccgaagaaaaactatagctattcaggtaaattctgatctaagtgtcactgtaagggctccgtatggtgtcacagagaaatacattgaggaatttcttaataagaatgaagcttggataagcaaacagatgaatgaaataaaagtaaagaagaaaagtgttgaatcgggaaatgtagaaaacgtgacactcgataaaatcaaggcacttgcagaccaggctcttaaaataattccggctagagtagaatatttcgcaagaataatcggagtcacttacgggaatataaccatcagaaatcagaaaacaagatggggaagttgcagcagcaaagggaatttgaattttaactgtctgttgatgcttgcgcctcctgaggtgttggattatgttgtggttcatgaattgtgccatagaaaacagatgaatcattcgaaagcattttgggcagaggtggagaaggcgttcccagattataaaaagtcaattaagtggttgaaagaagaaggaagccagattatgtacatggtaacagaacttgggaaaataccgggggatatttcaaacataaaaatgaaggatcgaaagaaatgaatcaaaatgaaacacaatgggataaactcctgaagataaagacaaccgggcgggatgactctcattcagatcagtatcgatatccttatgaaccaacgtcttatatggtattggagcgcctggcaaacagtggactgatcaggaaaaataatactctaattgactatggaaccggaaaagggcgggtatgtttttatctttcgtatcaaacaagatgcaagacaataggcgtagagtatgatgaacggatttataaaggagcagcagataataaagaagtatccgtttccgcatcacgcacggagtttgtattatgcagtgcagaaaattatgaagttccgtcggaagtggatcgctgttacttttttaatcctttttcagtagagatattgcagtcagttttagcgagaatttacgaatcttattatgaaaatccgagagatatattattatttttctattatccttcagaagaatatatcagtattttaatgactcaggaacagttgattttttatgatgagattaatacttcagatctgtttccgggtgaggataatagagaaaaaatcttaatttttcaggtactttaagaatgctcaaaacatattgaatagttacaaaaagaacgcctgttcgaaataatacttgcattatcgaacaaatgtttgtataatgaaaatatgaatacagaaattagaaatagtaattatacaacacaggaaaagctgcagattcttgctgacgcagcaaaatatgacgttgcatgtacttcaagtggatccagccggcggggaaagaaaggagagctcggcaatgcagaggcatgcggcatttgtcatagctttgcagcagatggaagatgtatttctctgcttaaaattttgatgacgaaccattgtgcttatgattgcaagtattgtatcaatcgcagaagcaatgacgtaaagcgggctacttttactccggaagaaatctgtgacttaacagtagagttttataagcgtaattatattgagggtctgtttttgagttccggaatcttaaggaatccgacgtatacgatggagaagatgtgcgagacattattgctgcttcgaacaaaataccattttaacggttatattcatattaagacgattccgggagcatccgacgagctacttgcggcagcaggatatcttgcggatcgtatcagtgtcaaccttgaattgcccacggaagaaggattgcatacattggctccaaacaagaccatgcagaacattctgaatcctatgggtaaggtgcagagtacgattgcatctcacagaatggcaatcggaaagtcagcttatatggagcgaagtggcgggaataagtttttgaatgcaggtattttttctgatgcttcgaaaaaacatttttctgagtgcttgaatgttcagaagaaggataaagccatttctcagaattctcagatgaatcgattagaatcttataaaaaatacacgtcactggatcatgcacttacctgggagaatgcgaaccagttggcacctcgtgatatgtcccgattgaagcgtagttttgctccggcaggacaaagcacgcagatgatcattggtgcgaccggtgagagtgattatacattattgcagacgacacaggcattgtatcaaggctttgatctgaagcgtgtcttctattcagcatacattccattgaacgaagataatgtgttgccggagataggaacgccaccaccgcttttacgtgaacacagactgtatcaggctgattggctattgcggttctatggatttcaggcaggagaactattatcctcagaacagccgaattttaatgaaatgattgatccaaagtgtgattgggcattacgccatttggagcagttcccagtagaagtagagaaagcgagttatgcaacactgcttcgtgttccgggaatcggaccgaaatcagcaagtcgtatcacttatgcaagacgttatggcagacttgattatgcgagcctgaagaagatgggagtagtattaaagcgtgcgcattatttcatcacgtgtggtggaaaacagatgtaccatactcctattgaggcatcttatattacgcgacaactaataagtgtagacaagaaagatctatggaatacacaacatgcgaatgaatcatttacccagatgacattgacagattttggagtatgctgatgaagatatttacttgtaaagaccgtctggaagatatcatgacctgtatctatgatgcatggtctgaagctttactgattggtcatgaccagatacaattaaaaaaagaacctgtatttcagcaaacgatatttgatgaatatattcatgtagaccaagatctttccaaagcagaaaaagtaattcgctcgattcagagagatatttcggatgaagcatatctgaatatctatttggcgactttatctgtcgaggaagatgcactgcaggcaatttataatttccttcgtgtcggattcaaaattggagagagtgtactacagcaatatgcgaatccacgtgtgatgcggatattagaattgcgtcgtaaagtgtctaacgaaagccatcatttcagagagttcgcacgatttgagcggttgaattcaagtaacgtctatgtcagccatctggagccaaaaagtgatgtcatcatgttggttggcagacattttgcagaccgcatgccttcagaacagtggatgatcatagatgacaatcgaaaaacagcttgtgttcatccgaaagatggtgagaactatctccgatatctgacagatgaagaatttcagacattgagaaagacagaagagtacgaagatgagtatacggatctgtggaagacattctttcatgcgattgcaatagatgaacgaaagaattacgtatgtcagcgtaacttatttccactgtggaagagaaaacacgcagtggaattcaaaaaataatctttttcttacttgtatctcatagtatggaaacgtataatgtaagaaagatgtgattgatacgtgatttttttttgatcggagacgataaaatatgccatatgatttatcaaaacctctcgtaatagggattagttcgagagctttatttaatcttgagcaggaaaataaaatattcgaagaacaaggtgtcgaagcatatgaggcttaccaggtagcacatgagaatgagattcttcagagaggtgctgcgttccaattgatcaaagcattcttggaattgaacaacacagaactgggaagactggtggaagtgatcattatgtcgcggaacaatgcaaacacatgtcttcgtatttttaattctatacagtattatggtctggatattacaagagcgaccttgacaagtggtgcagagatagccccttatctaaaggcttttaagacagatttatttttgtcagcgaattcagacgatgttcaatctgcaatcaatgatgggattgccgcaggacgtattcttacaggtgatgcgcatgctgatccaaagcaaaagattaatcagatccgcattgcatttgatggagatgcagttctcttttcagccgaatctgaaaagatttttcagaagaacggaatacaggcatttgaagaacatgagaaagcgaatgcgaacacgccgatggcaaaaggtccgtttgctaacttcctgacaaagctgtcttatgtacagcagctgtttaaagaaaaggatattcagccaatccgaaccgcactggttacttctagaaatgctccggcgcatgaacgcgcagtcaaaacactccgcaactggggtgtatcaatcaatgaagcgttcttcttaggcggtgtcagcaagacggaagtgcttgcagcatttggagcgcatatattctttgatgatcaggatatacataccgaaccggcttcaacggttgttccggcagctactgtaccttatcgtgatggagataatccaaaagaataagcaactttatattattttaaagatgatgggggaaaacgatgcaaacatatacatatgtttcaaaaggaaaatttgaattaacagaaaaacctaaaccggtgattatgcatgaaagggatgcgattgtaaaggttacacttgccagtatctgttccagtgatttacatattaagcatggaagtgttccgcgcgcagttccggggattactgtcggacatgagatggttggaattgttgaagaagttggcgaagctgtaacacatgtgaaaccgggagacagagtaacggtaaatgtcgagacattttgtggtgaatgttatttctgtaaaaaagggtatgtcaataactgtacggatcagaatggcggatgggctcttgggtgtcgtattgatggcggtcaggctgagtatgtgcgtgtaccgttcgcggatcagggattaaacaagattccggatgaagttactaatcgacaggcattattcgtaggagatgtactggctacgggttactgggcaactcgtatctctgaaatcacagaagatgatacggtgttgatcatcggtgcaggaccgactggtatctgtacattactttgtgttatgctaaagcatccgaaacacattattatgtgtgaaaaagatgaggaacgtatacattttatcaatgaacattacccagatgtacttactatttctccggaagaatatgagacttttgttaagaatacaagtgaccacggcggtgcagatgttgtcctggaagttgcaggtgcagagtctacatttcgtttagcctgggaatgcgcaagaccgaatgcgattgtgacagttgttgcactttatgataaagcacaaagcttaccacttccagacatgtatggcaagaatctcatcttcaaaaccggtggagtagacggatgtgactgcgaagagacgttaaaactgattgctgaaggaaagatcaataccgaaccccttattacacatacctatcctctcagtaagattgaagaggcttatgatctctttgagaataagagagatggtgttataaaagtagctgttgaatgttgagatagcacaagtattcgaaaagagcgaagtgaaagtttatgcttattgtaatcttaatggattatggaaagcataatcatagtctgattggacatttgtaatttcatactcgtaataattgattttgtatcataacgcttttgtttttatggcagaagcgttaattttttgcattatcacagatttatttacggttaaaatgtataaaaatacaaaaaatgacaaacaatttgacataatatataaatttttagttactttttcggcattctatggtacactaacatagtatatcaaaaaatgtgggaggaaactcaaaaatgagcaaaaaagaaggaaaagggttaaagtcttttaacaagggatttcaagtgcctgacacctacatcattatctttttagtagttgttgtagcagcacttctgacatttcttgtaccaaagggattttacgaaacacaggacatttcatacatgattaatggtgttgagaaaacccgtacagtaatcaaagacggaagtttccagtatctgacagatgatgcagggaacgtagtaacagaaggagtagcactctttagtggagatggtggaacaggattcttcaactatatgtataacggaatcgtaagtagttctgcgatcgagattatcgcattccttatggtagtaggtggtgcatttggtatcatgatccgtaccggtgcgatcgaatccggattgattggattgatccgtaaggcaaagggagccgaaaaactgttgattccagtacttttcgtactgttttctcttggtggagcagttttcggaatgggagaagaagcacttccatttactatgattctttgtccattatttgtagcagttggatatgactccgttattgcagttcttgttacttatgttgcaacacagattggtttcggttcatcctggatgaatccattctctgtaggtattgcacagggtattgcagggattgacgtattctcaggagcaggattccgtatggtaatgtgggtagtatttacagcacttggctgtggaatgacgatgttctatgcggcaaagatcaaaaaggctccgacaatctcaatcgcatatgagacggatgcgtatttccgtgaacagaacgaaaaaacaggtattgacgaaggacattcctttggtcttggacacattttagttcttctgacactggctgctaccgtagtctgggtgatttggggagttatgactcagggatattacatgccagagatcgcgacacagttctttattatgggaattgtttccggtgtgatcggagttatctttaagctgaacgatatgagattgaatgatattgcaacttctttcaaagatggagcaaaagatctaatcggtgcagcgcttgttgttgctatggctcagggtatcatgcaggttcttggtggatctgatccgactacacctacagttatcaacacaattatgtataatatttcaaatgcactgtcaggagtatccggagcagttgcagcagtacttatgtatctattccagtccgtattcaactttttcgttgtatccggaacaggacaggctgcaatcacaatgccgattatggctccactgtcagacctgttaggtgtatcacgtcagacagctgtagttgcattccagcttggtgatgcatttacaaacctgatcgttcctacatcaggatgtctgatcggatctcttgcaattgctaagatcgagtggtctaactggatcaaattcatgtggaaattccttggcgtattgatgattggtgcaattattacagttctgatcgctgtcggaattggattctaaaacaggcatttgataattgaaagtgatttaagatgaaattaattcagagtattgatgtttatgccccacagcatctggggaaaaaagatgtattgacgatcaatgacaagattgtcaagattaaagatgcaggttctatgtcagcagacggatttctttctgatgcagaagtgatcgatggagaggggttacttttaactccgggattcattgatagtcatgttcatgtactcggaggcggtggcgaaggtggattcgccaaccgtactccagaagcaactatagaaggacttacgaagtttggagtaacaacagttgttggctgccttggaacagatggaatcggtcgtgatatgtgtgcactggttgcaaagacaaaaggcttgaatgagcaggggatgtctgcatattgctatacaggtagttatcagattccggtccgcacactgacggacagtattgtaaaagacattatgatgattcaggaaattgttggaacaggagaaatcgcaatttctgatcatcgttcttcacagccgacttttgaagaatttgcacgtgtcgttgctgatacaagacttggtggcgttctttccgggaaagctggtattgtaaatgttcatcttggcgacagtccgagatgcttagatcttattgaacgggtggtagatgagacagagataccggtttctcaaatacttccaacacatatcaatcggaatgagatgcttttctgtaagtcaattgagtatgcactgaagggtggagcagtagattttacaggaaatgaagatattgactattgggaaactatctgtgatgaagtacgtgtatgcaatggtatcaaacgtatgttggatgcaggagtaaatcctgatcgtatgacaatttcctccgatggacagggaagccttccgatgtacagtagtgatggtgaattccttggaatgggcgttggacagtccagctgccttctgaaagaagtaaaggaatgtgtattcaaaacaaaaattccattagaaatagctatttctacgattacatctaatccgtcagagattcttcgcctcaaaggaaaaggtaagattgaagaaggctatgatgcggatctttgtattcttgatcaggaacttcagcttgttgaagtgattgcaaaaggcaacacagtttataaaaaataaaggtaactgttcagaggcatcagtcattcagttggctggtgcttttttcaacattaaatttatttttcagagcactttatgatataatggactcgtagtcttttacagacataagaacggatataaggagaatgtactattgatcaatcagacagcaaagaaaattttgaaagcattatcttttgatggagtagaagtggaagcatttcgtcatatggcggatttaaaacgactggatccaatgaagattttttataagaaagtagacgagaaaatatataacggaagtcatgcagttccaattcgaatattttttccaagcgagaaaagctttcgagaaattgaagaaaagaagcatgatattcaggataaaaaattgcttttgttcatacatggcggtggatgggttacagaaagtattgataattatgaaagaatttgcgctcggcttgcgaatgcaaccggacaatatgtagttgcagttgaatacagactggcaccggaagataaattcccggcaggtctggaagattgttatgctgttgcaaaagcggtatattctggagaatttatgttaaatataagaccagaaaacattactttgatcggagacagtgccgggggaaatctctgcgcagcattatctttgatggcaagagaccgcggagaattcatgccaaacagacagattctgatctatccggctacctataatgattatacagagaattcaccatttgtatctgttaaggaaaatggatccgattatcttttgacggccggaaaaatgcaggattatattgatctttatgcgagaaatgaggaggataagaagaatccttattttgcaccatatatagctgaagatttaacaaatcagccggatacattgatccttacatgtgaatttgatccacttcgagatgaaggggaagcgtatggggaacgcttgaaagaggctggaaatcatgtggagatacatcggattaaagatgcattacatggatacttcgcgttggggatcaagcagcttcatgtacaggaaagtttcacctatattaatgaatttttgaaaggggaaacacagtgagtaagaaaaacgcacgctggaggaaattagacaacgcagcgaaattatattctgctgccagtaacaaaaaagatacaagagtatttcgattttactgtgaattaaaagaagaagtaaatcctaaagctttacaggaagcactgaatcagacgatagaaacatttcctacgtttttaatggtacttcgtaagggattcttttggcattatcttgaaccgtgtaatctacggccgattgttaaagaagaatataaagagccatgcagcagactctatataagagataagaagaccctactatttgaagtgacttattataaaaaacgaatcaattttgaagtgtttcatgtgttgacagacggtacaggggcaacagaattcttaaaagaactggtaaagaattatttataccttgtgcataaagaagaaggattagaacagattacattactgccggaagatatgacggtacaagatcaggaagatgacagtttcttaaaatattattcaaaaaatcaaaaacgaccgaaaaaaagaaaactaaatgcttttcagatacgaaggaaaaagaaagatggaaatcatctgcatgttcatgaatctgttgtctcagtacaggcagtattaaagcgaagcagagaactcggagtatccatgacgatctttttgacagcattatttatgatggcaataaacgaagaaatgtctaagatgcagaagaaaaagccggttgtgttaatggttccggttaacctaagaaagtttttcccgtcttcatcgatgttgaatttttttaactggatcgaaccgggatataattttacaacacaagatcaaagctttgaagcagttctgaaatatacgaaagaattttttgagacagaattaacgaaagaaaaaatgtcagcacatatcagcgagttactagcactggaattgcatccgattttgagacttgcgccattggaacttaaaaacctttgtattcaggcaggtgcaaaatattcggagaagaatacaacagcaatcttttctaatatgagcgcagttaaaatgcctgcaagttatgtaccttatattgaacgatttggcgtatatacaaataccccgaagcttgaattatgtttgtgttccttccaggataaattatcatttgcatttacatccagatacgacacagtgaacattgaacgcaacttttatcgcttgttaaaagaacagggaatcatatctgaaaaagtaaagcctgaatttccaaagacaggtaagccaagcgaacaggaaatgaaagtctataagatctatagctttctgtgtattgcgattgttgcggcaatgcttgttacggatttgaatttccacccaagaattcgatggactttatttacagcaggaggcgttgtgacgatgtggattgcctcgtcaatcggatttttcaaacgttataatctgctgaaaaatgcgatgtggcagcttattatcggtacaatcatctgttttatatgggatgcactgaccggatggcacagctggtctgtagatcttgtgttgccgatcatgagtgtatctacacttgcagcaatgtttgtaactgctaaagtgcagaaaagtccggtgcgagagtatcttatttatgaaattatggctgctggatatggattaatccttccggtaatcttgcttttatgcggggtggtgaaaaatccaacagtgagtatgtttggagcattgacgtgtttcttattccttgtagcagtgattttgttcaagggaagagaatttaaagaagagatgcagaaaaatctgcatgtataaaataagcagaagagaagagcgtaaaagttaaaagagaaataaattgctaaagtaaaaagcacaagatggacatcaattatcccttgtgctttttacatctagaacctataaatcggattcaccattatactgaaaatgtagaatatatctttacaagttcaatcatcatatcaactactttatccatactctgaacagaaatgtgttcataagggccatgatatccatgacctcccgtaccaatatccgggcatggaagaccacgaaaactcagctggcatccgtcagtaccacctcggatcggtgagacaattggagtgagtccggttctttcacaggcaagctttgcattatcgatcaggtgcatatgttcttcaacaatatttttcatattaaagtactgatcttttatatgcagttcaattgtattttctccccattttttattcaactcgttagtgatatcagcgagtttgtcttttctgcgttgaaaattgtctgtgtcatggtctcggacgatataatttagagtagcatgtccacaatctccgctcatattaatgagatgatagaaaccttcatatccttccgtgtcacgaggtgtctcgtgtaaaggcaacagactattgatttccatagccagaagacaagcattgaccattgtatccttggaagagcccggatgcacacttaccccatgaatatcaaaagaagcactgcatgcattaaagttctcatactccagttcgccctctgtagaaccgtctaatgtgtaggcaaaatctgcaccaaataactccacgttaaaatgagaagcaccggtaccgatttcttcatcaggagtaaaagcgatacaaatcggaccatgaggaatggattccatccgcagatgttcaaccatagtcaggatttctgcaattccggctttgtcatcagctcctaagatcgtatttccatctgtggtaataagtgtatgtccctttaatgattccaaatgcgggaacatttccgggcttaaaattaacccactattgccaagagcaagttctttaccatcataatgttctgtgataatcggacgaatcggctgctcacagtaatcggctacagtgtccatatgtgcgataaagccaatagcaggtgcattctcatatccttttgttgcgggaagtttcccgtagaggaaacaattatcagtcagctgaatatttgaaaccacaagttcttccatttctttctttaaaagattggccagatcaaactggcatgcagaagaaggtgttgaatcgctggattcatcagaaggtgtttttataactgcatattttagtaaacgttcataggctttcatataaaatctccttaaaatgtaatttgttgtgtatatcgtatcatatttggcaggaagtgtatatttgaaatctgaaaaagtatgtttttattcgtataggaagaatggtattcttaacagtgatgtggtatactggacaatagattgatgttgttttttcacaagtagatggagaaaacaaatatgataatgggagagtaaaaatgattatcagaaaagcagaagaaaaagatattccaagaattttagagctattaaaacaggtattacaaattcatgcagacataagacctgatatttttattccgggtacgacaaaatatactatagatgaattgacagagcttctgaaaaataaagaaaagccgatatatgttgcagtagatgagaatgatgtttgcagggggtatgcattttgtcaattacaggagcagcccttttcaaataatatggtgcagtttaagtctctttttattgatgatctatgtgtcgatcaagaggctcgaggccagcatattggcgaaagtctgtttgaatatgtaaaaagtgaagcgaaacagctgggatgttatgaagtaacattaaatgtatgggcaggaaatactcctgctgagaaattttatgaaaaaatgggaatgcgaacgaaagaaagacaaatggaatacatattataagatagttttcacttcggggattacaatcaataaagccggtggaggattttgaatcccgcatcggctttgttgaatttatagataactcgaaagcttatgcaactgtaaaggtgctgaaccgttaaaactttatttgctatggttcagcagtgctttaatgtcttcttccggtgtggtaataggtgcaatgccataattctccactagaaaattcagaatattaggagacaaaaacgccggaagagaaggaccaagacgaatgtttttgatacctaaatgcagaagcgttaacaagatgcagacagccttctgttcgtaccaggagagaacaaaggagagtggaagttcatttacggaacatccaaatgcatctgcaagtgccacagcaacctgaatcgcaccataagcatcattgcactgccccatatccatcagccgtggcagaccaccgatttctcccagctcaagatcattaaaacgaaattttccgcatgccagggtgaggacaatactgtcagaaggtgtctgttttacgaattctgtgtaatagtttcggcccggtttggcaccatcacagccggcaaccaggaagaaatgacggattgctcctgattttacagcttctactacagtacctgcatgagacaggatagccgcatgaccaaaaccggttgtcacttttgtaccgccattgatgccagtgagtatctgatcttccttgtaaccacccagttccagtgccttttcaataaccggcgtaaaatctttcttttcatcgatatgaacagcacctgggaaagcaaccatttctgttgtaaatactctgtcagcatagctgctttttggcggcatcagacagttggtagtgtagagaatcggagcaggaagatgatcaaactctttctgctgattctgccatgcggttccaaaattcccttttaagtgagagaatttttttaagaacggataggcatgggcagggagcatttcaccatgagtatagatgttgattccttttccctctgtttgttcaagcaaaagctgcaggtctctcagatcatgtccggtcacgacaataaaaggccccttttctattgtaagtgtcacatcggttggttctggtattcaataggtttctgtatttgccttgtcaagaagtgccatacacttcagattgatttctcctactttaagcactgtgggaagcagagtttccacactctctccataaccaatcataaacaatgcttcgcagaagaatcgattcacctcggcatcttcataattcagaacatttgcatgataggcataggctgccatcccacgaatcccgaaaagaataagagacttcagagaacggatatcttcgttggcatcccacagctgctgcatatcgtattcatctgttttaccgcatggtgactgacatttgctgcagtcaggaaccagtctttctttttcagctctgactttttgtatcatgctttcaattgatgcgttgtcaaaatttacatttgtaactgtagtaaacagtccttcaattatgatttgcccggttcttttagaaatagttgctgcaccgtcaacagctcttgcaaggctgatcaacgcacctgtcagttcatcctgtaatttggctgtatctgcctttttcccacaggcgccggcatttcctgtgcagccggtacatccgactgtctgttcacactgaaaacaaaacattttcttatccattattgcattctccttctttttttattctatagttttcccatcaatacctatcgttataacctgccatggtaagaattttccactattttgaagcgctttttttgctgccatctccagaccaccacagcaaggaacttccatccttacgatcgttacgctttggatgttgttattttgaatgattgcagttaatttctcactataatccacctgatctaatttaggacagccgattaatgtcaccttattctgaataaaatccttatgaaaacttgcataagcgtaagcagtgcaatcagctgcgattaaaagctttgcaccgtcaaaatatggtgcactgactggtgcaagtttaatctggactggccagttctgaagttttgatacagaatctacggttgaagatggttttacagactcaggtgtttctgtccgccgaatctgcatgattttagatcccggacagccggagtgagaggacattgcctgattttgagtaactatttttttctgtgcttcttttacggcttcttcgtcatatgcaggagcttccctttcttcaaaagaaatggcacctgtaggacattccgggagacaatcaccaagtccgtcacagaaatgttctctcaccaattctgcttttccgtcaatgatatcaatggcaccttcgtggcaggcatccgcacagacaccgcatccattacatttttctttatcgattcgaataatctttcttatcatttttaccctccatttataacatttcacttttgtttctgctagaatcatagtataataaatacaacttgtatgtttgatttccaacaggaggaacgattttgaaaaaatatttgcctattctaagaaacagtccattcttcaaaggccttacagataacgagatattatccgtattgcattgtgtaaatgcaacaataatttccaaagaacgaaattcttatattttcagagcgggagattctaccgaggtaatgggacttgtgctgtcaggctgtgttcttgtgattcaggaagatctctggggacatcgaaatattctgtcaaaatgccataccggtgatttctttggtgagccatatgcagcaagcccgggagctgttttaaatatcagtgtgatagcagatgaggattgtgaaattatttccctgaatgtccagagactccttgtttcctgcccgacggcatgcgagcatcatcagaaactgatccgtaaccttgtcagtgtcctggcgaataagatactgatcctgaacgataagatcacccatgtcgggaaacgaacgaccagagataaactattgtcgtatctgtcagcagaatctatcagacattcgtcgttatcttttgatattccttttgaccggcagcagctggcagattatctttgtatagatcgtgcggcaatgtctacagagatatcaaagttacaaaaagaaggctatctaaaaacaaatcgaaaacactttgagttgaccgtttctaatgacacagattcaagaataaaaatgtgacatatgtcacggaaaatagagaatcaattcaaaagctattctatagtgcaagaggaggaagcattaaaatgataaataaattacatttggcaatgattgaattatacagaggagatgcaaagaggattcaacatttttgtaaagtgcatagttatgcaaaattgatcgcagaaacagaaaatgtagataaggaatgcttgtttatcattgaagcagcagctttgacacatgatattggaattcattcctgcgaagaaaaatatgggaactgcaatggaaaattacaagaaaaagaaggtcctgcaattgcagaaaagatgctcaaagaattaggctttgatcaggatgtatctgatcgtgtccagtatctgatcgcacatcaccatacatataataagattgatgaaattgattatcagatattggtagaggctgatttcctggttaatattatggaggatagtttatcgaaagaagctgcattaaaagcttatgaaagtattttcaaaacaacatgcgggaaaatgatttgcagggagatgtttgatttttgcagttgataatcagacgaatatttagaccagctgtgaagataaagcagcatttaaatacggcaaaagtggaggttattaacggaagttatgataataaatgaagaatgtaaaaaatgtcagataaaacgaaatattaataaatatcctattgatgcaacagaaggaaagataacagaatatcaatataaggtgaaggagattgtaaagaatagtgatgggttatctacaccacaggttgcagaaaaaatggataatcttcgtcaggaactttttggaaatgtgatggattatacagaaatcaaacagcattacaatcaattaatgcttgatcactttccgtatatgaaaaataaagttgatacatctgaaaatcatttaaaaacagcaatacagtatgcaatggttggaaactatattgattttggagctttagaaaatgtaaatgaaggtgagctgaaagctcaattagatgaagcaataaatataaatatagattctaagctgttggatgtttttaaaaacgacttggtcaatgcgaaaaggctggtttattttacggataactgcggagaaattgtaacagataagttattgatttcaactcttcgcgatgttaatcctaatttacatataactgtgattgtaagaggcaaaccagttttaaatgatgctacactagaagatgcaaaatacattcacatggaagatgttgcgcaaaaggtacttggaaacggtaccggattaccaggtaatgtggttggagcaatctctaaggaatcaatggatgaggttgagaatgctgatctgttgatttctaagggacagggaaattatgaaggactaagtggatgcggattaaatatttactatttattcctgtgtaaatgtgaaatgtttatgagacgtttcggtgtcgaacaatttacaggaattatggcaagagaaaataataaaaagtaatacttgtgtgaaagagtaaattccaccgcctagttttgtaaattgttgaaagaaatatattgttatatgattacgcaagtgatatacttaagtataagaaaaccgtgtgaaattacagtttgctttttgcacggttttctttatactagatagttagttaaaactaacacagtgaaagattatagaataacagatattaggtaatataatcaataagctatagaactaatactataccgctgaagataattatttttgccaatgaattttttcgaacatatcaatgaagaaatgcggatgcaagacgaaaaaggtactgtgattggagaaaaagcatgaaaaatgaagaatataaaaaattgtcaattaaagaatttacaaaagcagcaggaagatatgaaagtagccatgctggtatttacgaaatgtgcaagaaagattatccggatattctggaagaattagagaaggagtcatttagagatttattagatgcaggttgcggacctgctccgatgatttctttattagcagaaaaatatccagaccgacattatacaggactggatctgactccggccatgattgaacaggcaaaaaagaaaaatatttcaaatgcaacatttgttgtaggagactgtgagaactttccttttgaaaaggattcatttgatgcaattatttgttctatgagcttccatcattatccgaatccacaggcattttttgacagtgtgaaaagatgtctccgcccaaatggaagattgatactgagagatgtgaccagtgacaataaagtattggtatggctaatgaatacattggaaatgccgttggcaaatatatgcggacatggagatgtccaagtgccaacaagagatgtagtcataaaatgttgcaaaaaagcaggattaaaagtagaaaaatttgaaattcgtaaaggtatgcgaatgcattgtgttgtgagaaaacctatgggaaaggcgataggaagtgaaagataagtatcttagggaaacacgaatggttgatttttctaatccggcaattcaaaaacttattcaaaatatgaaatggaaagaaatgggtgaatttgaaaggattaaggcaatctacaactatgtaagagatgatgttttatttggatataatattgatgacggaatttcagcttcaaaagtacttgcagatggttatggacaatgtaatactaaaggaactttattcatggcacttttacgtgcctgcaatatcccatgcagagtacatggttttacgattgataaaagcctgcagaaaggagctatgaccgggtttgtttaccgtaatgctccaaaaaatattttccatagctgggtagaaattaattttgaaagtcagtggtatgaactggaagctttcattttggataaaacctatataaagaagttacaggaacgaaatccggaatgtaaaggtgcattttgcggttatggagtagcagtcaaggatttcagaaatctcattattgaatttgataggaacaatacttatattcagagcgaaggtatcaatcaggattttggtgtttatgattgtccagatgaattgttgaaggaacatcatcaagaaatttcagcctttaaggcatttgcttatagacatattggaagacacctcatgaatcgtaatgtcaggaagattagagaacgatagttttaagcttttagaattaaaaatttgtaggaatataaagatatggaattaagattattacgctattttttaacagtagcaaaagaacaaagctttacaaaagcagcagaacaattgcatattacccagccaacgctatccagacaaatggcggcatttgaagagaacctgggaataacattatttattcgaaacgggaagaaaatatcgcttactgatgagggaattttattaaaaaggcgtgccttggagattcttaatcttgaggaaaggacgcttgaggaactgaaaggaaaagaagaggttgtagagggcacgataaccattggatgcggtgaatttgcagcagtggagacattggcgaagatatgtaaaacatataaagaaaaatatccgctggttcagattgtattgcatactgcaacagcagatgcagtgtatgagatgatgaaaaaaggacttgtagatattgcattattcatggagccggtggacaccgaagggctggattatatccggatcacagattgcgatcactggtgtgtcggaatgcggccggatgatccgctggcagaaaaagagtttataaaaaaagaagatcttattggaaaacccttgatcttgccggaaagaatgaacgttcaaagtgaacttgccaactggtttgggaaagacttttcaaaattacagattgcttttacgagtaatctcggaacgaatgccggaattatggcggcaaatggactggggtatccaatttcaattgagggtgctgcaacaaagtattggcgagaggatattcttgtacagcgaagaatttctcctgaaatcacgaccagtacggtgattgcctggcgacggaatatcccatattctttggcagtccgtaaaatgatcgaggagattaatgctttccaggcataaaacaaaattcaatataagcattagacataatgaagcgatagagcttaaaatagatgtgtaagatgaatgtaaatcttatacatctattttttgtgaaaaatacgtatagaaaggggctttttattatgagtaaaaaattagtggcatttttcagtgcaagcggaacaacaaaaaaagtagcacagatgatcgcagaggaagcaaaagcggatttgtttgagattgagccgaagattccatatacaaaggcagatcttgactggatgaataaaaaatcccgaagcagtgtggaaatgagtgataagaaatacagaccggagattatggaaaaagagatcgatatgagttcttatgacgagatctttctgggattcccaatctggtggtatgtggctccgacaatcatcaatacatttttggaaacttatgatttcagcggcaaaaagatcgtgctttttgcaacatccggtggaagtggatttggtaatactgtaaaggaattgcagacatccgcaccagatgcggtgatcacagaaggcagtctgttaaatcgtggaacaaaacaggaaatcagtgagtgggtaaaatctttataaataacagtgctatggaggtatacagaatatggaaaaaatagtacagacagcaggaaaaaatgcacttggtgaatttgcaccggagtttgcacattttaacgatgatgtacttttcggtgaaaactggaataaccaggatatcgatgtaaaaacaagaagtattattaccgtggttgctctgatggcttccggaattacggattcttctttaaaatatcatcttcaaaatgcaaaaaatcatggtgtgacacaaaaagagattgctgcagtgatcacacatgccgcattctatgcaggttggccaaaagcatgggctgttttcaatcttgcaaaggaagtgtgggaaacaggcgaaggagatttgccatacgaagaggaagcgatgcgcgcgcatgcaaaagagatggtatttccaataggtgcaccaaatgatggttttgcacagtatttttccggcagaagttttcttgcaccgatttctacttctcaggttggaattttcaatgtgacattcgaacctggatgcagaaataactggcatattcatcatgcaaaaagtggaggtggacagattctggtatgcgttgccggaagaggatattatcaggaagaatgtaaagaagctatagaaatgaagccaggcgactgcatcaatattccggcagaagtaaaacactggcatggcgcagcaccggatgaatggttttcacatctggcaatagaagttccgggcgaaaatagttccaatgaatggcttgaaccggtaagtgatgaagaatatagaaaactaaaataggaaggttgaaaaaagtatatcagctgggagtcaatcccccagctgatatagcctccggcaggattgcagaggtgcgctgtagaagtatgtcatgcaattgcatgacgcgcacctcgcagcaagaatgccgaggcattcttgaattataagacaatttgcatatggaggttatatttatgttgaaagcagaagaattaaaactagtatctgaatgggataaaacttttccaaaaagtgaaaaagtagatcatgagaaagtgacatttgtaaatcgttatggaatcacacttgccgcagatttgtataaaccgaaaaatgcatctgggaaatatcctgcgattaccgtaagcggaccatttggtgcagtcaaagaacagtgttccggactgtatgcgcagacgatggctgaaaaaggataccttactattgcatttgatccttcttttacgggagaaagtggaggcaatccaagatacatggcttctccggatattaatacagaagatttcatggctgctgttgatttcctttctgttcgggaagaggtagatcaagatagaataggaatcattggaatctgtggctggggtgggatggctcttaacgcagctgcactcgatacaagaataaaagcaacggttgcatctaccatgtatgatatgacaagggtaaatgcgaatgggtactttgattttgaggacagtgaagaagcacgttatgcgaagaagcagtcgctgaataccctcagaacacaagaatactgtaaaggcgaatattccagagctggtggttgtgtttctcttccggttccagaggatgcccctttctttgtaaaagattacagtgagtattataaaggcagatgttatcataaaagaagcctgaattccaatgatggctggaacagtattggatgtatgtcatttatgaatcagccaatattaaagtacagtaatgaaatcagaagtgctgtcctcattgttcacggagaaaaagcacacagctattattttggaaaagatgcttatgaaaatatgattaaggacagcaagtacacatccaataaagagctgctaacaattccaggggctgttcatacagatctttacgataatctggatgtaatcccatttgataaaatccagaaattttttgaagaaaacggagttggttaattatggtaaaaaaagtattgatcatatcgacaagtcttcgaggagggagcaattctgatatacttgcaaatgagtgtgcaaagggagcaaaagaagcggggcatgatgtggaacttctttctttgaatcgtggacgtgtcagtttttgaggggttggtttgagggtctagaataattccagtcagctgtgtgaccaccttgtcggaaggagagaaagtgtgaaagaaagtggagaagtccatagatggatatagcggattcctgttttacgatgataatggaatgccacttgtggcaatgcactggcaacaccgctttaatcatatgatcggcagatacaatgatatttaccgggtgcagatgccaaacattacacctcatgtatgccgacacacctattgctcaaatatggcaaaatcgggaatgaatcctaagacgttacagtacctcattgggcattcggatatatcggtcacaatgaatgtgtatacgcatatcggattcgatgatgctgaggaagaattgaaacggatggaagagtttaggaaagcacaggcagaggttgagcagaagaaagagaaacctatgtcgcagaagatgtttaaggtagtttaatatggaaaagagatgacgctccggcttaggctggggcgttttttgtggaaaaagttggtgattgaagttataattataagttaaaaaggatgtgacctatttatggaagtaaatatgataattcttcccaagaataatagtgatatcaatttgggaatgaaaaaacagataaaacagctttttgaaaatttgtttaataatgtaaatgattcttcttttgagataaatttagataataatgtgaaaattgaatataagatatcttcaaaagaaaaaaatatggtctttcttaaattgatttgtaatgcgacaccagctagagccgcaaaatatcttgatagtgtaactaataggcttattcaaggtgaacataggaaaacctggaatattgtaatttcatatgatgaggtatctcagttatactgctgtaagttgatgccattatttggtatatttgaaagacgaatacgagagttagtatatataacaataatcaaaatatttggggttgagtggtatgataattcttttagtaaaagtttacaggatacaatgaagggaaagggaaacaaaacgaaaatggttgaaagtgctttgaatgagttgacttatgaacaacttaaagagtatttgtttacgccattttgtggaagaaatatttcagaggtattggaacaagaattatctgagtcaagcgtagaagaattgtcaaaagaagaaatcttagatattgtaaatcaatgcagaagcgaatctttatggaatcgttttttttcggagtataaacagtttaggaatatcaaagaaaagattgatgagctacaaccacatagaaatacggtaatgcataataagagaatgacgcagaatgaatatgaaaaggtaagaaaatcactgaaaaatattaataaattattagtggaagcaataaatgttctagagaaagatatttatactgaaacaaaattagtagatgtagtatctgcattaggaaatatgcttgttaaagtgttgggtgagtcaattccaagatggattgaaaagatgaaaccagcgttatcaaccttgggagaattggttattaagtcagcagttcctaaaattgatgtatcaagtgtaattccttctttggagattggaaatgcaatgagtgctcagatggaacagattagaaaacaatatcaggttgtgggaaatattgcagaacaggtgaattttgcaaaaagactagaaaatgcaggtaatcaaatggctatagcggctgcaaagcaaagtgcaatatataataattctatgttgtcccaaatgggtaatttatcccaaataagtaaaatagattatactccggcaatggatgtagcaagagagttatctgaacgaaatcaacgatttgcaaattcgcttggtataaacggaatgttaggagagacggtagatacagataaagaagacgatgacaaagaaaaagataaaaatccttagtagtaaccatttcccttttactactaattttactactaacaggtagtaacaacttgctccatcttgctctgatttgccacaatctgtaattttagagcatatcacaataaccccgaaaccccttgcaaaacagggcattccggggcaaaacaaggagaaacaaaactatgataaaagtgcttttcatctgccacggcaatgtcctgtgacatttgaataatacgttgcacatcgcggcaaaacgcggcatatcttgctttttccaataacacgtgactactgttttactacgaatgacggaatgcaaatagtatatctgtagtatgtttcgttaaatagttatgagctctggcattttgccggagcttcttatcgttaaaaggttctctgatatagatacaagataggtagcaaaacatggcaaatcagtgcatttctaggcattggtgaaatcgttaaattgttaggagtaatcgttaaaatgttgtgatatatcgttaaattgttagggcaatcgttaaaagattgaagtaatcgttaaaaggtatctttttgttgaaactattcctccgtgggaatataataaaaatgagatattcatgcaaatgaaaagaggtgttggtatatgaaagtaagtggaaaattatcatataaatcggcaattattgtgaatgatgtattttttaaggacatatatgaattattaagagaatattttgaaaaacctaaatattctgcacaacttataaatggtgatgaggttgagtttgaatctgtttcagaattaatatcatatgacaatttttctaaccgtgctataaagacaatgagaattggatttggaataggaaactatattaggattgaaccatcaatggcattcattaatggatataaatctacgttagaaatgggttttgaagttgaaaataatgacaaatcagaggaaataaaaagaaaagtaaatgacctttgtgataagcataaacaatcatttatgtacacggcagcatctaaattcactttaatgcacatctgtattttgttgtggggattaagttttattttgaacttgaacgtattaattacacataaaacagatgatggaacgatgtctaattcaactatagtagctgccgtcacagttggagtagtgattatgctgttgattagtgcggcactgtcatggataataaagcaatattttcctgctatcgttttttacttaggtggaaatataaaaagtgttgaaaagaagtcgaaaactaaaagtaatatattctggtgcatcattgtagcaggaatagtttctgttattgtttcatcattttttaattaaaggtagattaacttaaggtatttgtaatattggaggcatgccatctaaagatgacttacttatcacttgtataggtggtagtattggatggtcttggattgtagatgagagcaagttttattacaaagatggtaatgttgttacgtttgataagaacaactttatttatactaaattcctatattattggttaaattcattttcatttattaatcaagtaaaaattgatgtgggtggtacagcatataatgcgttaacaattgatatgttaaagaattatttgataccgttgccaccacttgaggaacaaaaacgtatcgtagcaaagatagaagaactcttaccattttgcgaccaattaataaaatagttatccaacaagggtgtgtcctgcacaccctttcgttagatttgaccccctggatgcaaaaatgaaccccctaaaatggctcaatggtttcaaatgcacccaccaaaatcagagtagtaacacactttattttgactacgtttctactacgaatgagtgtatcgatttgccttatattgccacgatatgtcaagatatgtacgaaaaatcaatgtcgcttggcattgtaacaataccttgtacatttttgaaagtggcaaaacacggcaaattacggcaaaataaggctttttaggaggaaaaaacatgagtattcgcgtgctctttatctgccacggcagtgtttaagggatgggacgaaagccttgagtttattgggtttcttgggagaaagtgtagaatttacaccttatttacacctttggaagatcggatcggaataatataatttgctaatctgtgttgatttttttatgattgagtataataaaagcaagaacagaaacgttctcgatgtaagagcatcgttaaaagttgggctgagatggagcagggtaaacttccatctcattagatgtcttaactgggcatcgagcctgacagcttggataaagaataaagagctggttttaattgtaaaatttatggggaactaacatcagcttattgacataaatttaaaaataagtataataatagttgattaattgttcaactattattatttggaggtgaacatatgtcaaaaacgtcttatatttgtaattgcgatgtaattcatgaggatattgtgaatgatgtgaaatccaagatgcagccaaaagatgattatatccagttggcttctttgtttaagctatttggagatggaactagagtacaaatcttacacgctctagaacagagtgagatgtgtgtatgtgatcttgcagtgctactgggggtaacaaaatctgcaatttcgcatcagttaaaggcattacgccttgcgaatctggtaaaattccgtaaagaagcacagatagtttactactcgctggcagatgatcatgtgaaagagattattgacaagggatttgagcatctttggcagaaataatattttttaacattatagttgagtaattgaacaactaaacaaattgtaaggagattatcatgaaacgcatatttctattaaaagggttggactgtccaaattgttccgcaaaaattgaaaaagaagtcggagagttggatggagtgcaatcctcagtggtaaatctgatgaagcagacgcttacaatcaatgttactcagacagccgcagatacgatagccagtcagattgaaacgattgttcatagccatgagccagatgtggaagtttctgaaattgtacaggaatcttatataccggaaaaaaagcaggaggccaatgaatcctataacaatgaggataagaagttgacagttcgtttagcgactggtgcagcaatctatgccattggtatggcattgactgtttttgcgaaagtgccactgcctatcgagttagcttttctcattgtttcttatgttattcttggtggagatgttgtatggcaggctgtgaggaacatttcaaaggggcgtgtatttgatgaacattttttgatgagtgtttctacgattggggcttttgtcattggtgaatatccagaagcagttgctgttatgctattctatcaggtaggtgaattttttcagtcattggctgttaagcgttccagaaaatctatatcaaacttaatggatatacgtccagattctgctacagtaagaagaaatggggaattgattaccatatctccagaaaatgtctccattggtgagattattattgtaaagcctggtgaaaaaattccattagacggtgtggtattggatggagattctatgctggatacaagggccttaacaggagaatcagttccgagaagtgttcataaaggagacgaagcactttccggttgtatgaatcagacgggtgtcttaatgattaagacaacaaaagcatttggtgaatctacggcttcaaagattattgatcttgtggaaaatgcgtcaagccgaaaagcaccaacagaaaattttattactacatttgcacgttattatacacctgtagttgtaatcttagcagcttttctggcggttctgccaccgatcattcttggcggaggctggacagagtggattcgcagaggatttgttttccttgtggtatcttgtccatgtgcattggttatttcaatcccgctgactttcttcggcggcattggtgcagcatctaaacgaggtgttcttgtaaaaggaagcaattatttagaggcacttaataatgtcagcgttattgtgttcgataaaaccggaacacttacaaaaggtgttttcaatgtgacggatattttgcctgcaaatggattttcaaaagaacaggttctggagtatgcggcagaggcagagagtttttctaaccatcctattgcaaaatccattcttgctgcttatggaaaagaaattgatcagtcagtgatttctgattataaggaaatttcaggatatggaatcagtgtaatggcaggggaaaagaaagtgtttgctggcaatacgaaacttatggatacagaatgtatagagtacacaacctgtgaaaacgcaggtacaaaagtttatttggcggtagatggtcaatatgcaggatgtattttgataacagatgaagtgaagccggacagtaaaaaagcaatttctgacctgaaacatatcggcgtggaaaaaacagtcatgcttaccggtgatgatgaaaaaattgggaagtccgttgcagaagaattgcagttggatgaatattatgcacagctgcttcctgaccaaaaagtggaaaaggttgagcttttagacagtaaaaagagaccgggaagcaaattggcttttgttggtgatggtatcaatgacgctcctgtccttgcccgtgcagatgttggtattgcaatgggtgggcttggttcggatgcggccattgaagcagcagatgtagttctgatgacagatgaaccgtctaagctggtggacgcgattgaagtagcaaaagcgacaaaacagattgtcatgcagaatatagtgattgctcttgggattaaaagtgtgttcctgattcttggcgctcttggtattgcgggaatgtgggaagctgtatttggtgatgtaggcgttaccataattgctgttttgaacgcaatgagaattttgaaaaaataggaaatgaggtggaaatgtgaaacgaaaactgattctgttagttgttacgattgtttttcttgtaggttttggtgtcattttacattcaccgccttctatgattgatgcagtcacaggagcaacaccgaagtcaaaaaagacggctcaagcctccgcacagttggaaggctcttatgttctcggtattaatatgatgtcagatggtctcgacaacaagaacacccggaataaattaaaagaattggcactggacgattcggaaacaaatgaaacagatctcatgaaaacggacattagttttcggttatatgtatctgagacggattatccgcttgtcagttatgctaagaaactctgtgacagattgaaacaggccggtttttccgtagatctgaaagagtacagtaacacaatgatgctatcaagagtggtaagtggaaagtatgatgtattcctggcatcggataattttattgacgttacaacgttatcacagatggactatatgatcatggacagcgaagaaatgaggtgagcgggaatttatgagaaaatggaatacgattttgtctgttttaatgcttctcatttttatgattcatggaatcatgggaagctttatgctgaacggagttggaagtagtgcagggaaacttcttgcatggattggtgttggtattcttgttgtgcatacggtgattggtgtcatcctgacagttcagagtttacagacagcgaagcaatccggaaaaatgtatctgaaacagaacgccatattctgggcgagacgagccagtgggctggcaatactgatcctgctgttcttccatattggcttgtttggaaaggtgcagaatgggacatatattttgttcccttttacaacggtaaagatggtaactcaacttttgttcgtggcggcaatctttgttcatatttttatcaatatccgcccattgctcgtatcgctgggaatcatcagttataaagaacgaaggggtgatatttatttgattctttcggtgctccttctgtttatagcgggcgcagttattttctattatattgggtggcaatatctatgagtaagacaattattattataggtgctggactggcaggactttcagcggctttgcaggcagcggaaaatggatgcaatgtaaaactggtttcctcccttccgtcagagcgggcacagtctgttatggcggagggcggtatcaacgcagctttgaatacaaaagatgaaaacgacagtcccgaagaacattttacagatacaataaaggcagcatgtggtctggcagatccaaatgcagtttggggaatgacacaggcagcaccggagctggtgcactggctgctaaaacttggagttaaatttaacatgagtggctatgatgatgtggatctgcgaaattttggcgggcagaaaaagaaacggactgcttttgcacagagcgataccgggaagcagatcatgacagctatgatagacgctgttcgcaggaaagaagcatctggtatggtagaacggttcagccatcattctttcctaacacttcgtctgtgtggcaatatttgttgtggctgcgtaatcagggatgaatacagtcaggagactgtggaattaccgggggatgcggttattgttgccaccggtggtatgcacggattgtttggaaatacaacgggttcgctgagcaatacaggagaagtcaccgcagaattgttccggcttggtgttcctctggcaaatggcgagatgatccagtaccatccgacaactgtgaaatgtggtggaaaacgcatgctcatcagcgaggcggccagaggggaaggtggcaggttgtttgccatgaaagatggaaaacaatggtatttcatggaggaaaaatacccggagcttggaaatctgatgccacgagatattaccgccagagagatatggagggtcagccatgaatcagaggtatttcttgacatgacggaaatatcggaggagattatttcaaataagctatctggtctggcagacgattgtatgacctatctgcataaagatatacgaaaggaaccggtgtctgttttaccgggaattcactattttatgggaggcattctggtggatgagcagcacagaacgccgattcagaatctttacgctgccggagaatgctgtgcccaatatcatggtgccaaccgtcttggtggaaattctctgttaggagcgttatacggaggacgtgttgcggcaaaatcagcatgtgaacaggcagatgtagtagatctatcttgtgcgacacagatagattttccaccagcgtctcaaatttcagaaataaagcaattaaacaaagtgatgcaggagactatgggcgttgtcagaaatgagaatacgttgttaaatgggattcaaacggtacaagcgctgacaggaaatcttccattgcttggcatggcagttctaaagagtgctcttgcaagaaaagaaagccgtggtgcacactggcgggaggattatccggagagcaatgacgatgattaccttaaaacaacggtagccagatttgatggaaagcagatacagatttcctttgtacctgttccagaaaggcggtgattcacttggtatataaaataagaatcaggcggcaggagagtcagaaatcagacagttattggcaggaatttgagtatgacggaagcaaaaacagctctgttgccactgttctaaaggaattgaacagtagaacccctttgaaagataactcaggaaatatagttactcccatcagctgggaatgtagctgtatggtgcgaaaatgtggggcttgcgccatgctgattaacgaacgtccgaggttggcatgctctacatttctacatacgttaaaaggttctacaatcatcttggaacctttaagcaaatttccgcttgtaagagatttgatcgttgaccggtcaaatctgtttgaaaatttgaaaaaactgaacctttggcttgaaagtgaagcttatatgagttcgtggacacatgaaccgagataccagtcagcacgctgtctgatgtgtggctgttgccttgaagtgtgtcctaacttctctgcaaatgggactttcgcaggcactgttgctgcagtcaacgcatttcggattctgaatgaagaacaggaaagcactcatttgaatgagatttctgctgaatataagaagagattttttgaaggatgcgggaagtcgttatcttgtcatgatatttgtccgattggtctgcctgtggaagaattgcttgtaaggtcgaatgcagcggctgtttggggcaaataaaatggatgataaaagctataatgaatgtatgaagagggtgtcgcaaaatcatcagattagacgatagagtgatgccctcgctctatcatatgtaaaaaaatcggataatcttttgaactgttgattctttccaattttttgcgtactttaataaagctaccagtttttcgcctttttatgcggtttcttttactggaaataggtggcttcctgttcgctcattctgtatttttgcatgcaacttattcaaattatatcccatacacaataaaagaatctccagtttcactttggttttcccacgaagcagaaatctttggaattcatagtcattttttagaactccgaatgctccctccacttgtatcgagcgattcatccggtataagattcccttttcgcttaaaatattttcactatctacaccaatctgcacgttatatcccggctttagctgtgcatttctcatgtgatcatctttcatgtgcataaacgtagcgtctggatctgttttacaataattattccttccctgaaaactggctgtatgccagtcataaacagtctggcgttctataaaacagcatatcttctgaatatcgtatgctctggtttctttcgatacactgaaagactgtaggtactcccggtttagcagagcgaccgcttcctgtgtttttaggcataaaaatggagctattgctccatagattgattactcatctattttgcaacagcccctttgtctttgatgaataaaggtcaattttttatttaactattctcactattatttgattcagtgatttttttcttctttggagaaacaagtttgtgaccagaataaatggacatgcccatacaaagcaatgaagaataggcaaagtatttatgtgcagtcatagattttttgattccagaataaatgcatcccaacatacagaaaagtgcgcctaaggaccagtatttatgtgatttcatgatttgatacctcctgtgatttaactgattcaatcataacgctttttttacgtaaatgcaaagaaaaactttgaatatagttctatagaattagaacttggttttgcgattctgtatatttaagatatccacaagtatactaaattcagaatgattattcgttctggaggaggtgttacgatgtatttgaacgcgaaataaaatagttattcaggtaaaagatgctcaatttgtcagcttttataataatgataattattactatttttattgacaacaggataatagtggtatataatccttattaagaactaatcctaataaggaggacgaatgacaagtaagagaaataccattcaaaaagatcttgtaagaaatgccgtatacgaaatgagaagacatgttacagcaaatgaagtgtatgaatttataaaagaagcatatcctacaatcggaaaaggaactgtatatagaaatcttgatatattggtagatgagggttcgttaaggaaggttgaagttccggatggaccgaataggttcgattttacattgaaaaatcattaccatgtcaggtgtgtaaaatgcggtgaagtttcagatgtggatatggatgaaataccggatttgctggaaagaattcataacactcatggaattgaatttgtggattatgatatttcatttaaaggcatttgcccgaaatgcagggagaaggtaaaggaggaacagcatggatagctgtgacagttactaaaacagaggacagtcagacaatatggcgttgcagaatttgcggatatgaatatgtaggcgaggaattaccagatgactttatatgtcctttgtgcaagcacccggcatcagattttgaaaaagtagtaaagaaaacggaggtaaaagagatggcagcaaacaaatatgcaggaacacagacagagaagaatttacaggaggcatttgcaggggaatcacaggcaagaaataagtataccttttttgcttctgtagcaaaaaaggaaggttacgagcagatgtcagcattgtttttaaagactgcagataatgagaaagaacatgcaaagatgtggttcaaggaattagcaggaattggtgatacaaaggaaaacctggcggcagcggcagaaggcgaaaattatgagtggacagatatgtatgaaggctttgctaaaacagctgaggaagaaggattccctgagcttgcagcaaaattcagggcagtaggtgagattgagaagcaccatgaggaaagatatcgtgcacttcttaagaatattgaaactgcacaggtatttgaaaagagcgaagttaaggtatgggaatgccgtaactgcggacatattgtggtaggaactaaggcgcctgaagtatgcccggtatgtaatcatccacagagctattttgaagtacatgaagagaattattaaggagatgagattattatgaagaagaaagtgattaattcaaaaaaagcagtaatgataggctgtggctttgttggttctgcatcggtatttgctctgatgcagagtggcttgtttacagagattgtccttatcgatgcagataagaacaaggcagaaggagaagcgatggatatcagtcatggtattccatttgcgagtccgatgaaaatatatgccggagattatgatgatgtggctgatgctgcaattgttgtcatatctgccggagcgggacagaaaccgggagagacaaggcttgatctcgtaaataaaaatgtagcaatatttaagtcaatcattcctgaaatagcaaagagaaattttgcaggtatcatgcttgtagttgcgaatccggtagatatcctgactcaggtagccataaagttatcaggacttccagaaaacagggttattggatcgggtactgtgttagatagtgccagattaagatataagcttggtgagcatttatctgtggacagcaggagtgttcatgcatttatactaggtgagcatggagacagcgaagttgtagcatggtcatcagccaatgtatctggtgttccattaagtgaaatgtgtgaaatgcgtggacattacaagcacaaggaaaacacggcagaaatagctacagcagtcaagaacagtgcgtatgagatcataaacaaaaagcacgctacttattatggaattgcaatgtctgtaaaaagaatctgcgaagtgattatgagagatgaaaaatcaatacttcctgtatcacacatgattcatggagtatatgatattgacggagtatcattaagtatgccagctattgtaggtgcagatggtattgagtctgatatacctattaatttaagtggcgaagaagcgttaaagcttaaggaatctgcagattcattgaaaaagattatagagacaattgaattataaattttacacatggacggagaaaaaggcatggaagtaaggtactgtatttgtaagcattgtggaaacattgttgaaaaggtaaaggataagggtgtacctgtaatttgttgcggagaacctatgcaggaattaaaagccggagtgacagatgctgctgttgagaagcatgtacctgtatatacggtagaaggcagtcatgttcatgtcgtggtcggagagacaaaacatccaatgcttgaagaacatttcattgagtggattacattaaatacaaaccagggaatatacagaaaacagttaaatccaggtcaggagccggtagcggatttttgcctctgcgatggtgaacaggtagaagaagtatacgcatactgcaatcttcatgggttctggaaatgctaaaaacacttgatattcatgctaagattacaaaacaattcagatacaacagtaatatatgctgtgtattaatatatttataaggaggaacaaactaatgaaatatgtatgtgacgtttgcggatgggaatatgatgaagaggaaggttatcctgaaggtggtattgcaccaggaacaaagtgggaggatgttccagaagattttgaatgcccattatgtaatgttggaaaagatcagttttcagaagttgaatagaagcctaatcttgtgttaaatacggatggataaaccaaaaccctggtgcgtgagcaacagggttttttattgcgatattttgtgatgatatcacagaaaataatctaccttttgcttataatgtagctagaaactaagtgaggaggtagtctaaatgagattaaaagacaaagtttcaatcattacgggtggaagccgtggcataggatttgctacagctgataaattcttgatggagtccggctttctatatccggaagcgccatttcctatgtcggcaaaaagaacagaaatcgatcttggaatgtgttggtatttttgccgatgatgtgatatactatgtaatagattaacgtagttttttggatagattttatggcggaggatcatagatgcgatatctttcagttactgaaatagcgaaaaagtgggatgtgtccgagcgcagtgttagaaattactgtgctcatggacgcgtaaacggtgcatttcttaccggcaagacctggaacattcctgagaatgcagagaagccggagcgttccaataaaaagaaagagcagccaattatattgctggatattctacaggagcagaaggcaagtatgtattccggtggtatttaccataagacacagattgacttaacatataactccaatcatattgaaggcagccgcctgacccacgatcagaccagatatatctttgaaaccaacaccatcggtgtagaaaaagatgtgctgaatgtggacgatgtgattgaaacagcaaatcacttccggtgtattgatatgattattgataatgcaaaggcagctctgacagagaagtttatcaaagaacttcatctgatcttgaagagcagtaccagtaattccagaaaagattggtttgctgtaggcgattataaaaagatgccgaatgaagtcggtggcatggatactgcacttccggaagaagttgcagataaaatgaaagcgctgcttacagagtacaacggaaaagaagaaaagacttttgaagatatcctcgacttccatgtgaagtttgagagaatccatccgttccaggatggaaacggccgtgtaggcagattgattatgtttaaggaatgtctgaaatataatatcgtgccgttcattatcgaggacaatctgaagatgttctactaccgtggactgaaagagtggaacaatgagaaaggttatttgacagatacctgtctgaccgcacaggataagtataaggcgtatttggattattttagaattgcatattaaacgtgattcaaagtgaaaaatttacgctttgagaaatgataaagttgaacaggtatctgaaaaactggaaaaacagataaatcatcagccgctttctgagttgtttggtcttgttgctgttactaatgcggaaaaagtaattcttgagcgtattcaggaaaaacagggacagataaaagaatatttaaagaatattatggctgaaatagctctgataataaggaggagcgaatgatagatatagaaaaaatgggagtgagatatatggagcaattactgattgttgaagatgatatcggtttgaatcaaggcttatgcaaagcgctgaaagcagatgctcggcagatcatttcctgtcaagacctaaaaacggcgaaggagcagctgctttgcggcggtgtatccctgatcctgttggatattaatctgccggatggcagtgggcttgagctgctccgggagatcaaggaaaacacgcccgggattcctgttattctgctgactgccaatgatactgatttggacatcgtagacggattggagagaggcgctgatgattacattaccaagcccttttctctttcggttttgcgggcaagggtgaatacccaactgcgaaagcaagcgtcaaaccataaaaatgcgccgatttgtattgatctttttcaatttgactttgaggcgatgaccttttatgcgggagattcaaaagtagaattgagcaaaacagaacaaaaattactgcgtctgcttgttgaaaaccgaggtcgaaccatgacacgtggagaccttgtagaccggatctggacagatggcgcagaatatgtggatgaaaatgctttatctgttacgatcaagcgtctgagggataagcttggtgcacagaaatacattaaaaccgtctatggaatcggttatagctgggtgacaaaagatgaatagaaccggcattgtgatcatactgctgtgttttctggtggcggtagctgttgtattatgggagcggagaaaggccaaaaaaacgatggaagaaatcgaaagaatgctggatgctgccatgaccggctccttttctgaaaccaattttgatgaaagccggctgtctgctttagaaacaaagtttgcacactatctttctgccgcagaagcatcttctcgaaatgtagcgcaggaaaaagacaaaatcaaatccttgattgcggacatttcccaccagacgaaaacgccgattgcaaacctgctgttatacagcgagcttttgatggaggaaactctgcctgcatcggcgaaggcaaatgtggaggcgctgtacaaacaatcggaaaagctgcgatttctgattgattctctcgtaaagctttccagactggaaaacgggatcatttcactttcccctcagcaagcagcgctacagccactgcttgaaagcgtagtagaacaatataccgccaaggcttctgaaaaaggattgtctttgcaactgcaggataccgatgcttttgctgtattcgacttcaaatggacagcggaagcgttggctaatatcgtagacaatgccatcaaatatacggagcgtggcacaatcaagatttctgctgtaagttacgaaatgtttgcaaggatcgatatatcggataccggttcaggcatcccggaaactgagcaggcaaagatctttgcccgcttttatcgttcaaagtccgttcgggagcaggaaggggtcggcatcggcttatacctttcccgacagatcatatccggcgggggaggctatatcaaagtcacctctgtctccggcaaaggaagcactttttccgtgtttctgccgaaacagcagccattctttcaaaactgttagatttttttgcgccctcgcaagaatgtggaaagaatcctatgcgataatctgtatgtgtaaaaggatcatttcctttcatacatacagattttttcatggaggtactcatttatggaagttttacaggcaaaagacctgaaaaagatttatggctccggcaataacgcagttcatgcgttggatggagttgatttaagtgtgaagaagggcgaatttattgcaattgtcggcacgtccggctccggaaaatccacgttgctgcacatgctgggcgggttggatcgccctacaagcggtacggtcatggtagacggacaggatattttctccctgaaggaggaagcgctgaccatcttccgccgcaggaaaatcggctttgtatttcagagctacaatcttgttccggtgctgaatgtatatgaaaatatcattctaccaattgaactggatggtggaaaggtaaacaagaattttgtgcagcagatcgtgcagacgcttggactgagcgaccgcttggatgcgctgccaaatcagctctcaggcggtcagcagcagcgtgtggcaatcgcccgtgctttggcggcagcgcccgctatcattctggcagatgaaccgacaggtaatctggattccaaaaccagccaggatgtattgagtcttttgaaagtcacaagtcaaaaattcgcccagacaatcgtaatgatcactcacaacgaagaaattgcgcagatggcagaccgcattatccgtatcgaagatggtcggatcgtctccgagaactaacgggaggtggctacgatgaatgtcaaaaacagaaaatgtattcgaaagctcagcttaaaatctctttatgcgaaccgtcgccgcaatctgattgcaatttttgctattgcgctgaccacgctgttatttacttccatgttcaccattgtcctgtcattgaacgccagttatgaaacctaccagtttcggcaggtaggcggctatgcgcatggcacctttaaggatgtttcccccgagcaggcggaacgtatcgctgcccacccaaaggtgaaggctgttggggcacggaaggcaatcggtatcactgcggatggtgtcttttccaaaacgcctgcagaaatcagctacatggatgccaactgtaccaaatggagctatgccaccccaactaccgggcggatgcccgaaagcggcaaagaggtggctatggatacgacagcgttgcagctgcttggtgtgacaccggaactgggcgccgaggtcacggtttcctattccatcatggacaaagatcaaaccggttctactgtaacagatacctttacgctggtaggctattgggactatgatgaactaatgcctgttcactacatcaacatcagccgtgattacgcagatgacatcgaagcgcaggcagtgaaaacagggttacagcctttccgcaccgatttgaatgtcatgctggcttccggcacaaacattcaagggcagatggagcaggtggataccgatcttggttacacatgggacagctatactgatcccaacagcgtccgaatcggcgtcaattggggatatacctcatctcagctggagtcgcagctcgatccagagctgataattgccatagcagcttttttgttgctggtgattttcacggggtatctaatcatctataacatttttcagatctctgttgcaggggatatccggttttacggacttctgaaaaccattggcacaacgccccggcagctcaaacgcatcattcgccagcaggcacttctgctttgtctgatcggcattccggcggggctgctactgggctacggcatcggtgctgttctgatgcctattgtcttgcgctccaccaagttggatgcaggcatcaccaccatcagcacttcgcctgtgatcttccttggttccatgctgtttgccctgttgacggtgctcttgtcctgttccaagcctggaaaaatggcagccaaggtctctccggtggaggctatcaaatatacagatgcaatgcagactaagaaaaaacagcgcagcacccggggggccaagctccatcagatggcctttgccaatctgggacgaaataagaaaaagacggtgctggtggtgttgtctctggcactgtcggtgacactgttcaatgcgctgtgtgcctttgtgggaggcttcagcatggagaagtatgtatcctccatgacctgcgccgattttatcgtcagcactcccgactatttccgtttcaacccggcagatgaattcatcacgccagaacagatcgaggagatcgcagcaaacacaaaagccagtctttccggcacgggatatgctgtgcgaaaaaccgcatacctgtggatgacggaggatgctctgcggcagaactatgcaaggtacgaaagcgccgagcagttagacagccatatgagccgcatggagcaccgggggaatatggtgatgggagatagcagaatcgaggctctggataacagtctgtttgacaagctgcaagtgtttgatggagatatttctcctatgttgaagccggacaataacgccattgccattgcggtttctttggatgattacggcaatctgcccaatcctgaatactaccccgaggttggagacacgatcacggctacctatgctgatgatgtgaaatatatcgacagccgcaccggagaactctgcaccgaagatacaccggaggagtaccttcaggcaaaattgtatggagccagagatgtagagtacacggtatgcgctttggtagaacttccgtattccatgggttatcgttatggtggtgatggctatgatgcagttttgtctgtggacaccgcacagagggacagcggtggtgcgaccattccgatgctctacctgttcgacacagcggacgaaactgacgaggccgaagcagagcaatatctatcgaagctcactgccggtgagttttcgcccttgatgtatgaaagcaaggccacggctcgctctgaatttgctcagttccggcagatgttccttctgataggtggtatcctctgtgctatcattgggctggtgggactcttaaatttcttcaacgccatgatgaccggtattctttcccgccgccgtgaatttgctgtgcttcaggctgtaggaatgacgaaccggcagctcaaaaccatgctgatctacgaaggattgttttacgcaatgtcttccgtagcggcggcctttattctgtcgctggcggtggaacctcttgcagggaaaatgctgggcagtatgttctggttctttgagtatcagttcaccgttctgcctgtcctgctgacaattccggtatttcttctgctggggttgctgatcccctgcatgatgtatgacaatgcagcaaaatgcagcgttgtagagcaattaagggatgctcaataactgttaaaccaagggttggaaggcatagacggttagaaaataacccacgggattttatgcagatattacatgtaaatatagatgattttttggacgtaacatgatagaatggttacaacaaaaaaaggagaacacccatgaaaccaagaacagaaatcagcatgcagctctacaatctgatgatggaacgaggttatccggagaatttatgtgatcttgtcaccagaaatctgaataccgattatacagcaacaagaatgatcggatatttatctcattattctgatttgccggatgtagaagttgtggatgaaatgcttgctattttaagtgaccgtaacgagcttatcaagaaaaaagaatctgaacaggcacaggccaggatcagtgagatttacagatttggattagacattaaataataatgaaatagataagagggagcaaaatctgccccctcgattatttttgctctaatatatacgccaataagccatcgcatccttcatttacatctctgtaagttgcatcaaaattcccagtataccagggatctgcaatatcagcaccttttcgtgatgtgtaatctaaaagtttagaaactttaccatccggatcacctttaagcatgcggttaagatattttatattgatcgaatccatacctatgatataatcgaaattatcataatcagaaaatgaaatctgttttgcacgatgtggtactaaaggaattccaacttcttttagtttgtttactgtacctctatgcggtggattcccgatttcttctgtgcttgtcgcaaaactgtctattacaaactgatcactcaaccctttttcttttaccttataggtaaacacgctttcgcttaaagttgatctgcaaatattcccccaacatacaaatgctactcttattttcatgatgtacctcattcttctaataaatatactggaaatatttctccctgtctcttatgcttccaatgcataggaaagaagctttttcaaattgtgatggaactgacgtttatatgcatgcagttttttcttctcagaaacggaatagtgtttctccacgtagatatcatatcgtttgaacaaacttcggaaatctgtatcctgtctttgtccccaacggaccagtacccagttcatggcatctatattccagtattcgcttggaattcctgccattttcaatgtggtaatctgacgcattgcctgcatggaaaggcggctgagctggcgttcacggtgcatctcatccggatcatttttcccaagctttttcattaatttttgagagagtgtctttgtcttggaagcacgttccattacacgaacactttgatcaatgatatcctggagctgcactgctgcattccagtaagtcacgaaagaaacggattctttctcatcttccggcgtaagtttaaatgtcttaaaaacacggtctgtaactccaaaaatttccagattataagcttttcttttcgccggattggaaagaacccggtaggcttccagaatctcctgcataaaagcagttgtatctatatctttatgcatattggcatccggatggtagaccttagccaatgcatttttcgctgaagtaatttcttccagagtcgcatctctggatacacctaagatatcgtaataagtgcgtgagctcattttgacctcctaatattagattccatttttctgaaatcacagaaaatggacagtacctctaatatacgcctgtaaaattgaaaagtcaattctctccagacatatttccccttcatcgctactatactggtaaaagaatagtccatgggggaattgcagatgaagaaaggttttacagtgattctgctgagtgtttttctgctgtataggattacatctccgacaagtgtagtccacgcggaagaagtagaaataagtgcgccgtctggtattcttatggaaatgtctacgggaacggttttatttgaaaaagatgcagatactgcacggccaccggcaagtgttacaaagatcatgacaatgctgttaatctttgatgcattagaaaatggaactatatcacttgatgatgaagtgtcaacttccgagtatgcagcttctatgggaggatctcaagtattcctggaacctggagagatgcagacggtaggtacgctgctaaaatgcatttctgtcgcaagcgcaaacgatgcatgtgtaactatgagtgaatgtatctgcggtaatgaacaagaatttgtaaaacaaatgaatgagcgggcaaaaggacttggaatgaaacatacaaacttcgtaaactgcaacggattagatgcagatggtcatgagatgagtgctagagatattgcactcatgtcgcgggaactgatgaccagatatccgcagataaaggactactgtacggtctggatggaaaatatcacgcatacaactgcccgtggttcttcagaatttggcctgacgaatacaaataagctgatccggcagtacgaatatgccactggtctgaaaaccggatccaccggaaaggcaaagttctgtgtatcggcaacggcaagtaagaatggtgtggatctgatcgcagtaattatgggcgctgaagattcaaaaagccgttttaaggatgcggtaaccttattgaattatggatttgggaaatgtcagatttataaagcaaaagaacggaaactgccagtagttctggtgaaaggtggcaaagaagatcatctaaagattcaatatgaggaaggatttacttatgtagatacagaaggatccgatttatcgaaagtcgaagaagtaacagaaattccagatgaagtaaaagcacctgtgaaaaaaggggaaacagttggtcggatttgttatcggataaatgggaaagaaattggatccgtaaatctgattgcttcaacacctgtggaaaaggcagattttggagattatctaaaaaagatttggaagaaattattataacacttgtcgggaacatggaaaatgttttataataaagggtacgaatgcgggtagctcagaataatattcagtctgttttatgaaattttactacccgcaatggatataaaaatacaggaggcagattaaattaatgattacagaacgtattgatcatacattattaagagcagatgcaacagaggaagatatccgtggattatgtgaggaagcagttacgtacggatttcattctgtttgtgtgaattcaagttgtgttgcgctttgtgcctctcttctgaaaaatacaggaattaaagtatgtaccgtgattggttttccgttaggagcaatgtcaacaactgcgaagattgcagaagcaacagcagcagtgaaagacggcgcagaagagctggatatggttatccatattggagcattgaagagtggaaactgggattatgtaagaagagatatcggtgcggttgtagctgctgccggggatgacgtgattgtaaaggtgattcttgagacatgtctgcttacagacgaagagattcaggaggcttgtcttgtaagccgtgatgcaggtgcagactatgtaaaaacttctaccggtttttcaaccggcggagcaactgtagaagcagtttctcttatgaagcgtacggttggctctgacatgaaggtaaaggcatccggtggtattcatacactggaagatgcacggaagatgttttatgcaggtgcagaccgtattggatcaagttccggtgtggcgattgcagaagctgagatgtccgagatacatacgatatgagcatcctaggttttttcacagttctttttctgattgtgtgcacggttatattagcagaaatgtatcgggagcagcattctttttgtgtaacacattacgaagtacattcaccaaagataacctgcacagccgaaaaagacccagtgaacagaattatttttttaagtgatatgcacaaccatgtttatggtaagcagaacaataaattgttcgaagctataaaagcagaacagccggatctgattttaattggcggagatatgctggtggcaaaaaatgacgtgcgataccaagaggcactggattttgtcagtcgtctgccgcagctctgcccggtttattatgccagtggaaatcatgaacagagaatcaaagagaatcaggaaaactattctttgtgttatgaagagtatcgtaaaaagttacaggcagaaggggttctttttctggaaaatgaaagttgcgatattctgttgggaaatcaacagattcatatcagcggattggaactcccactgattgtgaataaaaaattccgcaaggcggatgtcaccgctgaagatgtacgcagatgcctgggagaaaatcatactacaggaaatcaggaaaaacagcaggagacaacagagaatttcgcagacaacagttatcacattctgcttgcccacaatccatcctatatggaagcttataaggaatggggttccgatctgattttgtctggacatttacatggaggatgtgtacgcttgccgggaattggcggcgtgatcactccgcaggcatttctttttccaaaatattcaggagagatgaccgtggagggagaacagacgatcatcgtcagcaaagggcttggaacacatacatttaatgtgagactgttcaatccggcagaagtgattgcaatcaccctttgcagataaaaggagattattatgggaataccggtaaaactggaagtatttgaaggaccgttggatctgctccttcatctgattgagaagaataaagtagatatttacgatatccccattgtggagattacgaatcagtacatggaatatatccgtcagatgcaacgggaagatctgaatgtgatgagtgaatttcttgttatggcagcgacgttgttggatattaaatgcaagatgcttcttccaaaagaagtcaaagaagacggagaggaagaagatccaaggcaggaactggttgaacagctgctacagtataaaatgtataaatacatgtcttatgagctcagagaccgccaggtagatgcggatctgattttatataagaatccgacaattccggaagaagttctggaatatgtggagccagttgatcttgaccttttacttggggatctgacaatggtacagttaaagaaagtttttcaggaagttatgcgtcggcagacagataaagtggatccggtaagaagtaaatttggcaagattgagaaagaggaagtttcactcacagataagttcctttatgtgcgtgattatttacaggaacaccgccggttcagtttccgtcagcttcttcagaagcagaagagtaaaatgcatattgttgttacatttcttgcgattcttgaaatgatgaagctgggtgaaatttatgttgaacaagaatctacttgtggtgagatcatgatcgagagaaaaggagacgtagtgtaaatggcaggagtaaaaacacttcaggctgcaattgaagctattttatttacaatgggagagtctgttgaactaagtaaaattgcgaaagcaatcgaacaggatgagcagacaaccgaagaattacttcaggatctgatgaagaaatacgaatcaaagaacagaggaatccgcatcattgaactgggcaagtcttatcagatgtgtacaaagaaggaaatgtatgactatctgatccgtgtggcaaagcagccaaagaaatatactctgacggacgttcttcttgagacaatgtcaatcattgcgtacaaacagccgatcactaagatcgaggtagagaagatccgtggagtaaagtctgatcatgcagtaaataaacttgtggaatatggtctggtagaagaagtcggaagacttgatgcacctggaaaaccaattcttttcggcacgacggaagaattcttaagaagattcagtgtaccgtcgattgatgatcttccgtcattgaatccggagcagctggaacatttcaaagaagaagcagaggatgaggcaaagatccgtatggacatttgatttttgaattctacaacgtgcattggaatcataaaataaaaagaagaatggagcttccaatatagacaggaaatcaattgatgatagaatttaaaaagtggtatttcagaatctatttattctttgttcgcatactgattgtcagcatgatcattggagtttcttttccagttcatgtttttggaactacatctgatcatacaggacaaaactggaagataaatgtcagttctaacgaacgtcaggtagttccagatgagctaaaacaattatacgccctgtctgccgtcttaatggatgcagacagtgggcgtattttattttccaaaaatggacaggaaaaacgggcaatggcaagtacaacaaagattatgacttgtattcttgcattagagagcggcataattgattcagaaaatcagattgttacagtaagcgatcaggctgctgcacagccaaaggtacatcttggaatggttgcaggagaacggttttatttaaaagatcttctttattccttaatgctggagtcacataatgactctggggttgcaattgcagaagctgttgccggaagtgtagagaaattcgcagatctgatgaaccaaaaagcgcggacgattggctgttattctacttattttatcacaccaaatggattagatgcagcagattcaaatggaatccatcacactacagcagaagatcttgcaaggatcatgcgttattgtattatgaattctaagaaacaggaagaatttcttacgatcacgcgtaccgaaacctatcagtttcaagatgttgaaggaaaacggtcgttcagctgttataatcataatgcattcttaaatatgatggacggcgctctttccggaaaaacaggatttacttcagatgccggatattgttatgttggtgcgttgcgtagagataagcggacatttattgttgcactcctcgcctgcggatggccaaataataagagttataaatggtccgatatgagaactcttatgacttatgctttagatcattatcaatataaaacatttgaaattaaattacctgtccggcagatatttataaataatgggataaaggcacgttcagatacgatagattatcccggtaaaaacggaaccaaaattcctcttactgcaaatctgacacctgtttctttcctattgaaagaagatgaaacgatttctgttgactatgagattcctgatcaattggatgctcctgtaaggaaaggaatgcaagtcggcaggattcgctgcacgttaaatgacaaattgatccgtgaatatcccgtctatacaacacagaatgcagaaaagagaaccttcaaaaaatgtgtggaatatattttccacctgttttctatacaaaattcgtaccaaaaagcaggaaatattaaaaaagatcaagcgaggtgattaaaatagtcactacaatctaagactttcctgtgctaatataaacgagtgttaaaaaacaacaactaaattgattaaatataagagaggtacacattatggaaaactggaggaaatacgaaaagacttactttatgccacctgagccatgttatgactgggtaaagaaagattcaattgacaaagcaccaatctggtgcagtgttgacttgagagatggtaaccaggcactgatcgagccgatgagtctggatgaaaagttggaattcttccagctgcttgtggatgtaggattcaagatgatcgaagttggattcccggctgcgtctgagacggaatatcagtttttaagaacattgatcgagcagaacatgattccggatgacgttacgatccaggttctgacacaggcaagagagcatattatcagaaaaacatttgacgctgtcaaaggtgctccacatgctattatccatgtatataattcaacatctgttgcacaaagagaacaggtatttaagaaagataaagagcaggtaaaacagattgcaattgacggtgcaaagcttttgaaagagttagcagaagaaacagatggaaactttacattccagtacagtccggaaagttttcagggaacagaagttgactatgccttggaagtctgcaacgcagttcttgagatctggcagccaacagctgataacaaagcgatcatcaacctgcctacaacagtggaaaatgctatgcctcatgtattcgcaagtcaggtagagtattttaacaagcatctgcgtgacagagagaatgtaattctttctctgcatccgcacaatgacagaggatcaggagtttcagatgctgagcttggaatccttgccggtgctgataaaattgaaggaacattgttcggaaacggagagagaacaggtaacgtagatattattacacttgcaatgaatatgttttctcagggtgtgaatccgggacttgatttctctaatatgagtgacatttgtgaagtctatgaacgcgtgacaagaatgaaagtttctccgcgtcagccatatgcaggagatcttgtatttacagcattctccggttcacatcaggatgcgatcgcgaaaggtatgacctggagagaggagcatgactgtcagacatggactgttccatatctcccgatcgatccacaggatgttggcagaagatacgattccgatgtaattcgtattaacagccagtcaggaaagggtggcgtaaactatattctgaagcagagctttggaatcagcttaccggaaaagatgagagaagaagtcggatatcttgtaaaagatgtttccgacaaggctcacgaagaacttacaccagacaatgtatatcatatctttgaagaccattacatcaatgcgaaaccaattttcagtgttgatgaatgccactttaaacaagaagatggaattgtcgcagaagcaacgattcaccacaatggaagcaaccgcaagatcacaggtgttggaaacggacgtctggatgctgtcagcaatgcgatcaagcattattttgatatcgaatttgaacttgcattttacgaggagcattctttgacaaaaggatcttcttccagagctgttgcttatgtcggtgttatttccaacaagaagcgttactggggtgtcggagttgatgccgatattatcaaagcatctattgaagcactcgttgttgcagtgaataaattggatagcgtacagagatcccagacatgcaaggatgaaagattattagatattacaaattatatttacgcaaattataaagaagttacattggacgatcttgctgagaagttcttcctttcaaaaccatatttgtcaaaatacattaaagaaaaatcaggaatgacattcggagatattctgaaagaaatccgtatgaaaaaggcaagagcaatgcttaagagcagcagtgcaactgtagaaagtattgcagaatctgtgggatatcagaatgtagagcattttaacagaacatttaaaaaactgtataatatcacaccggtacagtatagaaacaaaccttgatcccgattcgagtttgactaaatttagaaatgtaatcttaaaacaaatcgcctgacagttaccataaatagtagctgtcaggcgattactgttatgcagattcattattctgctaattcttcccacaattcatacaattcttctaatcttgcttcatttgcagcgcgttctgttgaaagtttctggcactcaatagagttcgaataaacttcctctttcgtcagttcctcgtcaatctctgtgttgcgatcttcaagttttgcaatttcttcctctgttttctttaactcatttttacgtttacgttcacgtgcctgctgttccttctgttcctgccagcttaattttgaatccgaagcaggagtggatgcagcagaattgcctgaattggatacattttctgcatttgtttcatttccagaagcataagcaagtgtcagtgcttcttttttctccagataataatcgtagtttccgatgtaattaacaaatgtctgattcaccagttcaaggatccgggaggcggtctgattgataaaataacggtcatgggatacataaagtatcgttccgctgtagttatttaatgcttcttccagaatttctttggaagtaatatccagatggttggtcggctcatcaaggattagaaaatttgcttccgaaagcataagtttggcaagtgatacgcggcctttttctccaccgcttaacgtatgaatttctttgaacacttcatctccggtaaactggaatgcagcgagtgtatttctgatctgtgtattggtaagatcaggatagtcatcagaaatctcatcaaaaatggtcttatcatcatgaagtacgtgatgttcctggtcgtaataaccaatcgtcactttggatccaagtgtgaattcgccctgatccgctgcaataacctgattaatgatctttaaaagtgttgtctttccggttccgttatcaccaatcacagcgacatgttcgccacgtttgatttcaaaactgatatcactgaagagaacctgattgtcaaattgctttgagagatgttccactgtaagaacatcatttccgctgatctgcgatggttccagcgaaaaatgcatttctttcgtactgtcaaccggtttgtccaatggcgtaatcctgtcaagcattttctcacgactctctgcacgtttgattgatttttcacgattgaaagactttaatttatcaataacagcctgctgatgtttgatctctcgctgctgattcatgtattctttcagctgtgcatctcggatctgctgttttttcattgcataatctttataatttccaaggtacatgcgaacctgtgcattgtcaatctcaacaacttttgtgacaacacgattcaggaaataacggtcatgggagacgataaataccgctccggaataattgatcagatatgtttccagccaggcaatggaattcagatccaggtggtttgtcggctcatcaagcaggaggatatccggacttgtaagcagtaattttccgagagaaacacgggtcttctgacctcctgaaagtgtatctgtctgtttattaaaatcgtcttccgtaaacccaagtccctttaatacacctgtaatctcactttcacaggcataaccgtttcttgcatcaaattcagactgtagacgattgtaggtctccaggcggctctgcaattcctcaccctccagatgcttcagttcatgttcaatggaacgaatctgagcttccattgcaaaaatatccgcctttgcactttttacttcctcataaatggtatttccggattttaaatcctgacgctgcgcaagataaccgagtgtctttcctttcgcgagaataacatctccaccatcaagaggttcttctccgatgatcatcttaaggattgttgatttcccggcgccgttcacaccgacaagagcagctttctcacgatcttcaatatgaaaggagccgtctcgtacaatttcgcgttccccaaacgctttttctatattgtgacatgcgagtatcatatattttcacctcgttttttgacttctaacattatcattatatagaaaaatgtcgaaaatacaaggaaaatatatggattttaaaggtttttgcaaaacaaaagtttgacagaactttaactcttttatataataaagagtagtttaagagtggagggctaaaaattggaacaaagaaagatatcacgcgcagtcatttccagacttccgaggtactacagatatctgggagatctgctggaggctggcgtagagagaatttcatccagtgacttgagtaagaagatgcatgtaacggcttcacagatacgtcaggatctgaataatttcggtggattcggccagcaggggtacggatacaatgtgaaatatctttatacagagattggaaagatcttaggattggatagatgtcataattttattatcattggtgccggtaatttaggacaggcactggcaaactatgcttccttcgaaagaagcggatttattctgaaaagtcttttcgatgtgaatcctcgactggaaggcgtaacgatcagggggattcctgtgcgtatggttgatgaactggaagattttcttaagaataatgacattgaaattgctgcactgacacttccaaaatcaaaagcaattgaagtggctgatattctggtagataacggtgtgaagggaatctggaattttgcacatacagacctttcccttccaaaggatgtggtcgttgagaacgtacatttatctgacacactgatgaagttatcttacaacctttgtcagcaggataaagaatagaatctagcaaagctgcaaggatgctgtgggaccaactgacaaaaggaggtttcgcagcatctgttcatgttaaaaggaattaataatgttagaaaggtcaggcgataagcatgagatatcttccaaatgggaagcagatgagtgaagctgatgcacacacaattcatgaaattgggattccatcccttgtacttatggaacgtgcagcacttcagattgtcgagacaatgcataagaaaaatatttccacagaaaaaagtctgattgtttgtggaagcggcaacaatggtggagacggatttgcagtagcaaggctcttaaccgaacagggaaagcatgcagatgtactatttgcagggaaagaagcttctttaagtgaagaatgtcgatgtcagaaacagattgtagaaaatatggggatttctgtattcacagaattcccggatgaagaatatactgtaataattgatgctgtatttggtgttggactctgccgtgaaatcacaggacattatagagatgtgatcgactggatgaatcttcaggatgcagaaaaagttgctgttgatattccatccgggatctgtgctgcaacaggaaagattcttgggacagcatttcgagccgaccttacagtatgtatggcatgtgtaaaattaggctgtgagcttttccctggcaagtcgtatgcaggagagagcattccggttgcgattggaattgatccgaaatatttttcgaatcgcctggatgtttgttatacctttgacaaaaatgatcttgaaaaacttcttccttcgagaatgatgaattcgcacaagggaagttatggaaaagttcttatgatcaccggaagtcccgggatggctggtgctgcatttctttctgcctgtgctgcctatacagttggtgccggtctagtacagatttatacagcaagtgaaaaccgtctggcactgcaggaacttcttccggaggcaatcatatcctgctatgattcttatgatgacagtcaactgtctcatcttcttgactgggctgatgtggtttgtattggctgtggacttggaatgggacagatttccgaaaagatattgaaaaatgtattgaaaaatgtatcctgtccatgtgtcatagatgccgatggacttaatttactgagcaggaatatagagttattaaatcaatgttgtgcacctgtgattttaactccacatatgaaagaaatgtcaaggctgaccggatggagtattgatacgatcatggaagatcgcttccaggcacttgatcagatcataaaacaatccggaccggatacaaaatcatccataatctgtgtgttaaaagacagtcgtactgttgtcgcacagacaaatcggcagagatttgtaaatctcgctggtaataactctatggcaaaaggtggttccggagacgttctcgccggaacgattgcaggacttcttgcacagcatatggcaccatttgaagccactactgtgggagttttcctacatgcctgtggtggagatgaagcgaaaaagagcaaaggaagttacagcgtattagccagagacctgattcagggtatggccgatgcaatgaagaatgcaaaggagtacagataaattatgaaacagtataacagagtatgtgcccggatcaatctggacgcaattgcatataatatggaacagatgaaaaatcgcattggtcaggagggacgtttaatagctgttatcaagacggatgcatacggacacggagcagttcctcttgcggaaatgtttgaggaaacgccttatatctggggctacgctgtagcatgcatgggagaagcaagaactttaagagcacatggaatcaagaaaccaatcttgattcttggctgtgtttttcctgatgagtatgaagaaatggttgaaaaagaaatccgtgcagcagtttatacagaagagatggccaagggaatggctgaggctgccgtaaggtcaggaaagaccgcatttcttcacataaaaattgatacaggaatgggacgaattggattcaaagtaagcaaagaaagtgttgagacaatttccagaatcagcaaacttcctaatattaaaatggaaggaatgttcacacactttgcaaaggcagatgaatttgacaagtcttatacatttgcccaacatgaaaaattcctctggatgaaagaacagttagaaacaaatggcgttcagatttcctattatgattgtgataacagtgccggaattattgattttccggatatgaagcatgatcttgccagagccggaatctctatttatggaatgtatccgtcagatgaagtgaaaaaagatgctgttgacctgaaaccggcactggaattaatcagccatatcagctttgtaaaggatgtggaaaaaggaacttccatcagttacggtggaactttcgtcgcgccaaagaagatgcggatcgctacgattcctgtcggatacggtgacggatatccgcgttccctttcaaataaaggctatgttcttatccatggaaaacgtgcagatattgtaggaagagtctgcatggatcagtttatggtagatgtaacagagattccggaagtaaaattcatggatccggttactctggtcggaaaagacaaggatgcaattatccgtgtagaagatctttctgatctgagtggaagattcaattacgaatttgtctgtgatctgagcaagcgtgttccgagagagtattataaaaacggtacgatcgtaaaacagattgattatttcgaataaccggaataattgaaagaatctggttgatatgcatacatccgataaaaccggagatactttagtatgttcttagaagaaaaacaaaaggttctgagaagaatcagagaacaaatacgaaaagtaactggaatatcggagtgtgaatgaattgataattaagcggggcgacatttattacgcagatcttagtcctgtcgttggttccgaacaaggtggaatccggccggtacttataatacagaataacataggcaacagacatagtccaaccatcatctgtgccgcaattacgtcgaagatgaataaggcaaaattgccgacacatattgaaatctgtacaaatgattataatattatgaaaaattcagtcattctgctggaacagatccgtacaattgacaagaaaagactgagagaatatgtctgtcatatcgatcaggaacgaatgaaaaaaattgaccaagcaataagaatcagtctggatcttactacataaatccaaccaaattctttacagaacaaaaaaagcgtggtaaaattataaagatagtgctttacagaacttagtgtgtatctgtaaatgcaaatgaatttatataaaatacattgatacaatagaaaaggagaatcagaatatgtcaggacattctaaatttgcgaatatcaagcataagaaagaaaagaatgatgcagcgaaaggaaagatttttacaaagattggacgtgaacttgcaattgctgttaaggaaggtggaagtgctgatccgacaaacaacagcagacttcgtgatgttattgcaaaagcaaaagcaaacaacatgccgaatgatacaatcgagagaaatatcaaaaaagctgccggagaaggaactgctgataactatgagcgtattacatatgaaggatatggaccgaacggaaccgctattatcgttaagactcttacagataacaagaaccgtacagcttccaatgtaagaaatgcatttacaaagggatgcggaaacgtaggaacacctggatgtgtatctttcatgttcgatgaaaaaggacagatcattattgataaagaagagtgcgatatggactctgatgatcttatgatgactgtacttgatgcaggtgctgaagactttaacgaagaagaagacagctacgaagtattaacagcaccggaagacttcagtgatgttcgtctgaagatggaagaagccggaatccctatggtttctgctgaagttacaatgattccacagacatatgttgatcttacaaaagaagaagatattaaaaacatccagaaaacacttgatcttcttgatgaagatgatgatgttcaggacgtataccataactggaacgaataatcagttataagaaatgggggacaatgatgagtaattacaagatggaaactaaatgtgtacagtccggttacaatccgggaaacggtgaaccacgtgtgctcccgatcgtacaaagcacaacattccgttacaccagcagtgatcagatgggaagactttttgatcttgaagagtccggatatttttatacaagacttcagaatccgacgaatgatgcagtagcagcaaagatctgtgatatggagggtggagtagcagcaatgctgacttcttccggacaagcagcaaacttttatgcgattatgaatattgctgaaggaggtgatcatatcgtatgtgcgtctgccttgtatggcggtacatacaatctgtttgctcacacaatccgtaaaatgggtgtgaaagcaactttcgtagacccagactgcacagaggaagaactgaatgcggcatttcaggagaatacgaaagctgtttttggagagacgattgccaatccggcattgactgtttttgattttgagaaatttgcaaaagctgcacatgcacatcatgttccgttaatcgtagataatacatttgcaacaccgatcaactgtcgtccttttgaatggggtgcagatattgttactcattcaactacaaaatacatggatggacatgcagcctgtgttggcggtgcaatcgttgatagcggtaactttgactgggctgcttacggagacaagtttgccggacttacaacaccggatgagacttatcacggaattgtatacacagaaaagtttggcaaagctgcttatataacaaaagcaacatcacagctgatgagagatcttggatcgatccagtctccacagaatgcatttcttctgaaccttggactcgagagtcttcatttgagaatgccaagacattgtgaaaatgcattaaagatggctcagtatctccagggacatgagaaagtagcatgggttaactgtccgtcacttccaggaagtaaagattatgacctcgttcagaaatatatgccggatggaacatgtggtgttatcacttttggattaaaaggtggaagagaagcagcagtaaagatgatggacaaactgaaactggttgcgattgtaactcatgtagcagacgcaagaagctgcgtacttcatcctgcaagtcatacacatagacagatgaatgagcaggaattgttggaagcaggtgtacagccagatctgattcgtttcagtcttggaattgagaatattgaagatctgattgccgatgtagaacaggcactggaagattaatataaataacatatgattcaggaggtatggattcccatgattttgtatccatacctcctgttttttgtatccgaattgtaggttttaaacagtagttagctcttttgcctaaatcgtggagattgatatgcagaattggatacaatacatatttcccccgtattctgtgcatgctagtaatagtatttatttactttcaacaggaggcatatttatatgagcgaggaaaaaaagcaaaaatcagatgaaatcaaagaatttggtgcgttaatgttaaatgaaaataaaaagaattacaaaattcgtcttctgacaattataggtgaaattgaaggacatgaaacagtatcaaataatacaaaagcaacaaagtacgaacatttacttccacaactagctgaagctgaagaaagcgatgaagtagagggggttctcattttattaaatacactgggtggagatgtggaagctggacttgcaattgcggagatgatagcttctttgggaaaaccaaccgtttctcttgttcttggtggaagtcattctattggaggtcctcttgctgtttcggcagattattcctttattgtaccgacaggaaccatggttgttcatccggttcgttcaaacggtacttttatcggtgtgacacagagtctgagaaatatggaacgtacacaggatagaattgccagatttattgctacacactctaaaatcacagaaaaacgtcttgttgatctgatgttgaaccctacgcagcttgtaaaagatgtaggaacactgttagaaggagaagaagctgtaagagaaggaattatcgacgaagtcggaggcattcaccaggcatttaaaaaactctatgaattgattgatgaaaaacgggaaaaaccttcggaaatgtaaatatagaacaaaaaaatggcatctgatcaaagaaattttgtaatgacatgaattttaattgatgttatacttgaaatagtatgtattcaatctatcgtttgattgaatcagtacaatggtataataattaagggggaatcagatggctgcaaaatctacaaatacgaaaaaaagttctacgaacaacacagcgaaagcagcaaaaaatgcaacaactaagaaaacatcgacagcaaaaaaagcttctgcctccacaaagaaaagttctggcagtaagacaaaaagaacttcaaatcatataaatacagcacaaagtcaggaaatccgttcagagatccttctattgggttcccttgccatctgcatccttcttatcctgagtaattttgatatgggtggcatagcgggaggagcaatttcttctgtaggatttggacttgtaggagcaatggcatatttatttccatttgtatttttcggggcagttgctttttatatttccaataaaggaaatcctcatgcttacataaaagtaggtgccgcaattgttctggtcattctcctttgtggaattttagaattgatgtttcatccatatactgccgggacatctgttttatcttactacaaagattccagtgctgataaaaatgcgggtggattacttggcggaattctgatcagcattttatgtccactgattggagaagcaggtacttatgttattttgatcattttctcaatcatttgtatcattctggtaacagaacgttctttattagctccacttggaagacatggaaagaaagcttaccaggaagtgaaacggaaacatcaggaaactgctgagatccgtacactggagcgggatgcccgcaaagaggcacttgcgttgaagcaaagagaaaaagtagaaactttacaggcagatgcatcttctccaagtgagaaaaagaaacgcacaaagcggacagaccttaaagcatcaggtattacgttcgccacaacgcttctttcagaggaagaatcacctgttggtggctttgggcggactccaaaatcacctgaaatgacagaacttgtcccggagaaagagccggattcaaaagatctgacggattcctttgaagatcattttgtcattaacagagcagaaccggcaatggatgtacaggaagagattccatttgacgatgcactgcatcttgaaccggtacagacacccgcttcccgacaagaaaacgagatgagttctgaacatgatccggctgcggatcctatgattgaaaatagcccggagataaaacaggagcattccagaaaaagcagcaaaaaagacgcgcaggcggttgccgcagagactgccagtgtagaacagaccatacgggaacaggagcaaaaaccacggccggtttatcatacacctccgctgaatctgttaaagaaggggaagaaaggcggcggtgattcggatgaacaccttcgtgccacggctttaaaactggaacagacactacagaattttggagttggagtacatgtaacaaacgcaagctgtggtccatctgttacaagatatgaacttcaaccggaacagggcgtaaaagtaagccggattgttggacttgcagatgatatcaagctaaatcttgcagttgcagatctgagaattgaagctccaatccctggtaaagccgcggtcggtatcgaagttccgaacagtgaaaatacagcggttatgctgggagatctgctggagtcaaaagagttcaaaaacagtaaatcgccaatttcatttgcagttggtaaagatattgccggaaaggttgttgtgactgacattgccaagatgccgcatcttcttgttgcaggtgcaacgggatccggtaaatctgtctgcatcaacactctgatcatgagtgttatttataaggcagatcctgatgatgttaaactgatccttgtcgatccaaaagttgtggaactaagtgtatataacggaattccacatctgatgattccggttgtcacagatatgaagaaggcggcaggtgctttgaactgggcagttgctgagatggaaaagcgttacaaactttttgcacagtacaatgtacgtgatttaaagggctttaatgaaaaggtcaaacatggggaaaccggaccggagattcagaaaaagcttcctcagattgtaattatcattgacgagcttgctgatcttatgatggttgctccgggagaagtagaaggtgctatctgtcgtctggcacagttggccagagcagcgggacttcatttgattcttgcaacacagagaccatctgtaaatgttattaccggattgatcaaagcaaacatgccttcccgaattgctttttctgtatcatcaggtgtcgattcaaggacaattatcgacatgaatggtgccgaaaagctcctgggaaagggagacatgctcttttatccatccggatatccaaaacctgtcagggtgcagggatctttcgtctcggacgaagaagttcaaaaagttgttgattatttgattgacaagaacggaaatacctcgtacagtaatgaactagaagaacagatttcgagcagcgcagatcttccggggcaggggatgcttccgggacaacaggacagcgagaacagcagggatgtctattttgcagatgcagggaatctgatcatcgacaaggaaaaagcatcgattggtatgcttcagaggatgttcaagattggtttcaatcgtgctgccagaattatggatcagctatgtgaagccggtgttgtaggtccggaggaaggaacaaaaccaagaaaagtgcttatgacaaaagaagaatttgcagaatatatgcagaatcagacttcgtaaaatctaaaaacaccaaaagtgatacaaaggagagggaaagatgaaaacagatattcagattgcacaggaagcagaaatgaaacacatcaaagaggtagcggtacaggccggtatttcagaagatgaacttgaattttatggaaaatataaggcaaaactttccgatgaactctggaacagaatcaaagataacgaggatggaaagcttgtacttgtaacagcaatcaatcctactccggccggagagggtaagactacaacatctgtaggtctcggacaggcatttgcaaaacttggaaaaaaggcaatgatcgcacttcgcgagccatctctcggaccatgtttcggaatcaaaggtggagcagccggtggcggatatgcccaggtcgttcctatggaagatctgaacctgcattttacaggagattttcatgcgatcacttcagcaaacaaccttcttgcagcaatgcttgataatcatatccagcagggaaatacacttggtattgatccaagacaggttgtatggaaacgttgtgtcgatatgaatgatcgtgttctcagaaatattgttgttggacttggacgcaaaacagatggtatggtccgtgaagatcattttgtcattacagtggcatctgagatcatggcgatcctctgtcttgcagatgatcttgctgatcttaaacgcagacttggaagaatcattgttgcttacaatttcaagggagaacctgttacagcagatgatcttcaggcaacaggtgctatggctgcacttctgaaagatgcgatcaagccaaacctgatccagacacttgagcatacaccggctttagtacatggcggtccatttgcaaacattgcacatggctgcaatagtgtacgtgcaacaaagatggctctgaagttaagtgacatcactgtcacagaagccggatttggtgcagatcttggcgctgagaaattctttgatatcaaatgccgtatggcaggtctgaaaccagacgcagtagttttagttgcaacagtacgtgcattaaagtataacggtggcgttgcgaaggctgaccttgcagaagagaacctggatgcccttgcaaaaggtattgtaaatcttgagaaacatattgaaaatattcagaaatacggtgtaccggtaatcgttacactgaattcatttgtaacagatacggatgctgaaaatgcatttattgaaaaattctgtcgtgaacgcggatgcgaatttgccctctcagaagtgtgggagaaaggcggagaaggcggtgtagatcttgcgcagaaggttcttgagacacttgagacaaaagaaagtgatttccatacgctttataatgatgagctttctctgaaagacaagatccgtacaatcgcacaggagatttacggcgcacatgatgttgtatatgaacctgcagctgagaaacagctcgccaagattgaatctatgggatttggttctttcccgatctgtatggcaaagaatcagtattctctttcagatgacgctacaaagcttggaagacctgaaaactttgatattcatatccgcgaggtatatgtaagtgcaggagccggttttgttgtcgcactgacgggcgctgttatgacaatgcctggacttccaaaagttcctgctgcaaacggaatcgacgttacagatgacggaaagatcaccggacttttctaaagttttttatgattggctgccggtcacagtattttttgaccggcaatgccaattgttttcatggagttagataattaattaaggagatacacatggcacagttgatagatggtaaattaatctctcagcagattaaagatgagttgaaagaagaagtagaacagtttaaggcagaaggcattgatatttgccttgctgttattcaggtgggaagtgatccggcttcttctgtatatgtcaggaacaagaaaaaggcatgcgcctatatcggggtagaatccagatcatatgaacttccggaagaaacttcggaagaagaactgatcaagttagtagaagagttaaatgcagatgaaagcgtaaacggaattcttgtacagcttccggtaccggatcatattgatgaagataagatcatccgtacgatttcaccggataaggatgtggatggattccatcctgtaagtgttggaagactctggatcggagaaaaaggatttttatcctgtactccggccggaatcattcagcttttgaaaagatcgaatatttcgatcgaagggaaagaatgtgtgatcattggacgaagcaatatcgtcggtaaaccaatggcggcccttttgcttcgtgaaaatggaactgtaaccgttgcacattcccgaacaaaagatcttaaagaagtagcaaaacgagctgatatcctgattgttgcaattggaaaagagcgttttatcacatctgaatatatcaaagagggagctgttgtcatcgatgtaggaatgcatcgtgatgaagcgaaccatctttgcggagatgttgattttgcggatgttgaacctcattcttctgcaatcacaccggtaccgggcggtgttggtccaatgacaattgcgatgctgatgaataattgtgttgaaacagttcgtaagtaggaggaacttgtaaatgaggtgtacacattgcggagcaaatataccagacgatcagttgatttgtcccgtatgcggtgctgaagtacagattgtaccagattataaccctctggaagatgtactcgcacgcgaagtgaaaggctcagtagccggagctacacgtcagatccaggcagatgtagtccgaagacaaaatgtgagccaaaaccaacaaaacagaaatcggcaaaatcaacgatcgaatcctaattccacacgcgtcttaagccaggcggaactggataaagtaagagaagagcgaagagagcagctacggcgccagagagcgcaaagacaacgtcagaaaacagatgcaaagcgttatcaggatgcccgtcagtcaacagagaatctgcgccggacatctactgaaagcagacgcctgcagcagatcaaaaaacaagaagctgccagaaaaaaacgccaaaaattacttacggtttttttcctgctcattcttctggttggtgtcggaatttatatcggatatcagaattcctatacaggcatgatcaaaaaagggaatgccgcactgcagaatagtaactatacttctgcagagaattattttaacagagcaattataaaggataaatcaaaggcagaggcttataccggacttgctaatatctatgttgcccaggatgatctggacagtgcagagagcgtctatctcaacgcactggagacacaaccgtcgaatgtaaatctctataaagctgcagtaaaattctatgagaaaacagaacagccgaataagatttctgatctcctgcaggattgtgaagataagaatgtattatctgctatgaatgattatgtttcatctgctcctgaattcagtttgaaagaaggaacctatgatgaagtacagcaggtaacattaacatctgctacaggcggaacgatttattatacaacagatggttctgatccgacggagtcaagtacagaatacaaagaagctgttttgcttcagtccgaaggtgacacagagatccgcgcaattgctgttaataaaaagggaataccaagtgctgtttccagtgcgaaatattccattgaatttccacttgtagacgctccggcagtttctccatcaaccggacaatatagtacagccactcagatcacgattacggtaccggatggatatacggcatactacacgatagacggttcaactccgaccacatcctctgagaaatatactgacccgattgatatgccagaaaattcacaaacaactttttcagcaattctcgtgaacgataaaaatggaaaagcaacggaagtaacaacacgaaactatattactacatattaagcaaactgtgtaaagtaactagaaagtaaccttgattttggaaaatattatgtaaattttccaaaatagggttgctttttttagcatacagagttataataatatctgttaaaaaaataacaatactacataaaaaaggagagatttgttatgagtagattttgcttaccaagagacatttatcatggaaaaggatgtcttgaagaactgaagaacctgaaaggaaagaaagccattcttgtagttggtggcggttctatgaaacgtcagggattcctggataaagcagttaattatctgaaagaaggcggaatggaagttcagctgtttgaaggtgttgagccagatccgtcagttgagactgttatgaaaggtgcagaagcaatgcgtgctttcgagccggattggatcgttgctatgggtggtggatcaccaatcgatgcagcgaaagctatgtgggcattctatgagtacccggagatctcctttgaagacctgatcacaccattcagcttcccggaactgagacagaaagctaaatttgcagcaattcctacaacttcaggaacagctacagaggttacagcattctcagttatcacaaactatcagactggtgtgaaatatccactggctgacttcaacatcacaccagatgttgcaatcgttgatcctgaccttgttgcaggactcccggttaaacaggttgcatatacaggtatggatgctcttacacatgcaattgaagcatatgtatccacactgaacggacctttcacagatccacttgcactgcaggcaattgagatggttcttgattatctgccaggatcttacaaatgtgatatggttgcaagagagcagatgcattatgcacagtgccttgcaggaatggcattttctaatgcattacttggtatcgttcattcaatggctcataaaacaggtgctgcattctctacaggacatattccgcacggatgtgctaacgcaatttaccttccatacgttatcaaatacaacgccaaagacgctgtagctgcaaaacgttatgctgaaatcgcacgcagaatgggacttgccggaacatctgagcaggctctgatcaacagccttgttgagaagattgatgagttcaatgtaagactgaacattcctaagactctgaaagacttcggaatcaatgaagaagaattcaaagaaaaagttgacaagattgcagaactggctgtaggagatgcctgtacaggatctaacccacgtgcaatcgatccggctgctatggctaaacttcttacatgtacatactacggaacagaagttgatttctaaaatcaaaaattaataaaggtttcagtgttcttataaaataagataacgctgtaaacttgtcttaaacaatacgggtagatgcatgaaattgtgtgtctgcccgtatgttttacttgaattcatagctgaagtgtcgtattattaacaaagagcgagttgttattgtttacacaatgtttgaagacaataacgtcgatttatttacaaggaggaaaaacatgtataagatattaaaagctgaaaaactggctgataagatttatctgatgaatgttcatgcaccacgtgtagcaagtcactgtcagcctggtcagtttgtcatcgttaaaatggacgagaaaggcgaacgtattccgctgacaatctgtgattatgacagagaagcaggaacaatcacaatcgttttccaggaagttggagcttctacagtgaaaatgggagaactcaaagccggagacagtttccgtgactttacaggtccgcttggatgcgcttctgagtttgttcatgaagaccttgagtcccttaagaataagaagatgctgtttgtagccggtggagttggggctgctccggtttacccacaggtaaaatggttgaaagcacacggaatcgatgctgatgttatcgttggtgctaagacaaaagatatgctgatccttgaagatcagatggaagctgttgcaggtaattactacccatgtacagatgacggttcctacggacacgccggaatggttacaactatggtagaagaacttgtaaacaacggaaataaatacgatgtctgcgttgcgatcggaccgatgatcatgatgaaatttgtctgtctcttaacaaaaaaacttgagattccgacaatcgtcagcatgaacccgatcatggtagacggaacaggtatgtgtggtgcctgccgtcttcaggttggagatgagattaaatttgcatgcgttgacggaccagagttcgacggacaccttgttgactttgatcaggcaatgaagagaagccagatgtacaaatctgaagaaggacgcgcaatgctgaagcttcaggaaggcgatacacatcacggcggatgcggacattgtggaggtgacgaataatggctgatatgatgaaaaaagtacctgtaagagagcaggatccaaaagtacgcgcaacaaactttgaagaagtttgtctcggttataacaaagaagaagcaatggaagaggctacaagatgccttaactgtaagaatgcaaaatgtatccagggttgtcctgtatccatcaacattccggcatttatccatcaggtaaaagaaggaaacattgaagaagcttacaagatcattggtaaatccagtgcacttccggctatctgtggacgtgtttgcccacaggaatcccagtgtgagggaaaatgtatccgtggaatcaaaggtgagcctgtttctatcggaaaactggagcgtttcgttgctgactatgcacttgagaacgatattaaaccagaaggcgctgagactatgaacggtcacaaagtagccgttatcggttctggcccgtccggacttacatgtgccggagaccttgcaaaactcggatacgatgtaacagtattcgaagcattacatgagctcggtggagtacttgtatatggtattcctgagttccgtcttccaaaacagaaggtcgttgcaaaagagattgagaaagtaaaagagctcggtgttaaattcgagacaaacgttgttatcggtaaatccacaacaatcgatcagctgatggaagaagaaggattcgaggcagtattcatcggatccggtgccggacttccaatgttcatgggaattccgggagagaatgcaaacgaagtattctccgcaaatgaatacctgacaagaagtaacctcatgaaagctttccgtgatgattacgatacaccgatcgctgccggtaagaaagtagctgttgttggtggtggtaacgtagctatggatgctgcaagaacagctcttcgtcttggcgcagaagttcatgtagtatacagaagaagtgaagcagaacttccagcaagagctgaagaagttcatcatgcaaaagaagaaggaatcatcttcgatcttcttactaatccgaagaagatcaacgttgacgagaacggtaatatcacaagcatgacagtgatcaagatggaacttggcgaaccagatgcatccggaagaagacgtccggttgagattgagggctctgagtacgacatcgaagttgatacagttatcatgtctcttggtacatcaccaaacccgctgatctcttctacaacaaagggacttgagacaaaccgcagaaaatgtatcgttgctgaggaagagaatggacagacatctaaagaaggcgtattcgccggtggagatgctgttacaggagctgctacagttatccttgctatgggagctggtaaagcaggtgccaaaggtatcgatgaatatctgagaaataaataatagaaggaagattgtatataggagcataagcttctttgagaaaatcggaatttaaaaacagaatatcctgacaggatgcagaaaaatctgtgcttgtcaggatatttttatatatattaggaaagtcctttcctaatatatatataacgctccgctcaggatgcgcactgcggcgtataaggtaggtgtcgcaagcgaccgctgcatgcgcaagaatgtgccgaatcacattctttgttctatatattttttaaataactggaaatttcaaggtaatagagtaagaatcggattcaatatttacctgacaaagtccattcatctgatgcatcatagcatgtatatttttgacaccaatgcctgtcccgtgtacaaattgatcaggaacagcgatcgtattttggatggtaatacaggcagatgtcttagtgtattcagaaatcagaaaaactggcagatcaggatgggcatattttttaatattagaaacaagattattaataatccgtccagcaaaatctgtgcatatttgtatctgtaccggttcccagtagagtttttctatagaaacatgatatccgtccatttccagtaatccacatagttcggaaaggtattctcctaatgcatattctacattttccggctcctctaatttcataggattctctgagttgattagaaaaaaatcaaagagctggttagataaatcacgtatctgtgttgtcttgacataagctttactaatgtagtctgtgcattcattcaaggagttttgctttctggcaatttctaaaaatgtcataagaccagttaaaggtgttcttaagtcatgagccatactaagtacaagctggtcctgggcagatttcatttgagcttcctttagttgcttttcaatcaaggaaagacgcatttcgtttaagccatgtgcaagagtggccaattcatcatttccctttataggaatttcgtagtctaatgcacccgattcaatttgtgttacaccagaacttagctgttgaatatagttcaccttttttccgattccaatagcgaaaagtaagatccatagaaaaatactgataaatgcggcagctatatagtataacagataatacttcaattcataattcgcataaatgtaaacgtctgcatctccatcagaaaaagatacagtatgaaaatattgccaattgtaatgtaaagtatccgattcagaagtatttcccagaacgatagagtttgaataggtactgtcatagattaatactcgttcgcgagaaatagtaaaatgccgaattcccttttgatgagcccaatcgccaagttggtcggtatctgttgcagcaagctttttcttatgaacaaattctgtgagctcattaatgtacgatgtttctgaattatagatgaaatttgaactggcaaaatattcacttagcaaagttgttcctacctgaaaaaggatcaaaaagagaataaaagctgctgcaaaaccagataaaactaagaaaatgatttctttcgtaagactgttgcgttttaatttaaccaagacgatacccctttccccaaacagtttgaataattttaggcttttgaggattttcttcaatttttgtccgaagatttcttatatgtaccataatagtattagccgaagtacttataaaaggttcttcccaaatactttcatagagattttgaagagaaaatattttagtggggtactgtattaataaaagcaatattttgtactctatttcggttaattgaatttcattcccttgttggaacacaatgttttttgtagaattgatgcgtatctgatgggtttcaatccactcttctttctgaatttgcaatatttctcgatcataaacctgatgacggcgcagaagagctctgactcttgcgaaaagttcagtataagagaatggttttataagataatcatctgctccggccataaatccaattaatttgtcggattcttttgatttggcagttaaaaaaagaatcggaacataagaaatttttctgatttcttcacaagtcttcaatcctgagatgccaggcatcataatatcgagaatgactagatttgtgttcggagtgagttttttcagtccatctgcaccgtttgaagcttcttcaacggaataaccttctccttccaataaaatttttactccttctcgaatatctttgtcgtcttcaatgattaatatatttttttccatgaatgtctcctaatatttattattgtaaaaaatttaagataaaagcattaaattataatgtctgctgattagttactacccaaaacatactatgaaaagtagtgcagagcggtctatattttatgcattttataaattagtaggcttatttataataccataacaatgaataagagagaatagacttaagaattcttcagatttcttaagatgaaacttaaggagtttttgataaattaaagaagaattaattggttcaccgggaaattcagttagttacattggaagattatgtgatgaaggagagagaaaatagtagtcacaatagaaacaaagattatttaaattttgcacatacaaaatatgttggttcttggactttcacgaaacgattgggagattaatatgaaaagagcaaggcgagaaattattagaattttattaatattaattattcaaattctgattagtattcttttatcttatttaatcgatgaaaaatggaattttaaaaccctttttgggaattatggttttataatattttggagtagttatattgttgttattataagcattggaattgcaaaaaaattaaaaaattataagtaaaaaatgaatttgttcatgttataatttaagataggcaatgaaaagtttttgtgacatacagattcaggaatgctttttcaaacagacttcagggaaaggtgagaatatgataaatttgatttatacaatcataaatattgcattaattatagttattgtagctcttattgtttattttataagaaagaagaatagataataggtgaatatcgagaagaaatcggcataaaggacaataaactccatagatattttgaatgtattagcttttcaacccgaaagctgaactgttacccattttatctgcaattttgctcaaattagatgacaacctgttcgaagatatggtaaaataataaaccaaatgcttacaaatttcaataaacctaagaagcaaaaatctattttgggggaaatataaaacatatgacgaattataacagcaatgacaatcgatttgatggaagatgcttccttgaagatgttgagataaagttacaaaaacgactggaagaaatagggcagtctctctctgatggacagaaagagattgataacatgcaggaatattactgggaaaattatacggagatggatgaatatggttacgaagattatgataatcagcaggcacttctgcatcaggtcaacgctaataatgagaagctgcaattaaaacatagatttgagaaaatgttagatgcaccttttttcggacgtgtcgattttatgtatgatggagatgacgaaccggaaccgttttatattggaatcggaaattttgccgaaaaaacaggcatgcagcctctgatctacgactggagagctccgatcagcagtttgttttatgattatgataaaggccctgcaagctatgaggctcctgccggaagactggatggagagattctttcaaaatggcagtttaaaattcagaatggagaacttgtctatgcctttgaaagtgatacaaagatcgatgatgatattctgaaaaaagaacttggaacaaacagtgatgtaaaattaaaaaatatcgtccgcacgatccaaaaagaacagaatgcaattatccgaaatacgaaagatcgaatccttgtaatccagggagctgccggaagtggaaaaacttcgattgctttacaccgaattgcataccttttatatcatgaacgcgacactctgaaatcatccaacatactgattctttcaccgaacagcgtatttgcagattatatctcacatattcttccagaattaggagaagagaatatccgtgagatgagttttgatctctacgcctacaaagagcttcgaaaaggtgtcgctgcagactgtgaggatcgttatgatcagttggaacgtcggatgaagtttccggatgaatcagctcagaatcgttttgactggaaacaatccaaagattttattggtgaaatagaaggtttccttgcgattctggaagatcgtctgatagaattcaaagaaattgagttccgtggaatgacattgacagaagaagacttgatccaattgttctattataaattcacagagactccgttattgaaacgtatggacgctgtaaaagactattttatcgattcctgggaaactctgaaaggcagaaatatttcagaggatgatcaggagatgcttcagatgaaattcgacaagatgtacacaacgaaagatatttacaccatttataattggatgctcgatgactgtggttgtgatctgttgccggaagttccgtacgaaaagagaaagctcccttatgaagatgtatttcctatgctttatcttaaatatcgtctttccggtgggaactcaactcataagaacattaagcatcttgtcattgatgaaatgcaggactacacttatttgcaatacaccatcctggaatccttgtttcattgtagaatgactattcttggagaccgtgcacagacactggatacaaagcaacaggatgtactgagatttctccctaaattacttggacgtgagatccgaacgattgagatcaaaaagagttaccggaacacattggaaattgcccggtatgcggaaaaagtcagtggagtatctaatcttgagttactggaccgccatggaaaagaagtagtagaaaagacatttaacacagatacggaattgcttgatgaacttgtctgtcatttaaaatgtccgggagactttgaaactgctgccctgatcacaacaacagaagaagaagcttttgacttaagccgtctcctgaaacttcgtggtatcaacgtatcctatgtggatcgtaacagttccgcatttaagaaaggactcacagtaaccacattttatcttgcaaaagggctggaatttgaccaggttttcgcacttcgcggtgcaaaagaaaatccgcttaaaaatcaggcggaatacatttgcgcaacaagagctcttcacgaactctatgtttacgaaattgctgacagcttatcaaaataacagttaacaggcatgcatgattaaaatttattcagaaagaacagaaaaatgaagattacattaataaccgtaggaaagataaaagaaaaatatctgcgagatgcaattgcagaatacagcaagcgattgagccgatactgcaaactggagattatagaagtagctgatgaaaagacacctgaccatgcaagtgatgtcgtggaaaatacaattcgcgataaagaagctgagcgcattatgaaatatgtaaaagaagatgcctatgtgatcactcttgagattaacggaaaacttcttagttccgaggaactttctgcaaaaatcaatcaacttggaattcaggggacaagccatatcacatttatcattggcggatccattggtttgggcaaagaagtgctcgcaagatcggactatgcattaagcttttccaagatgacctttccacaccagttgatgcgggtcattctgttagagcagatatacagaagttatcggatcatcaacggtgaaccttatcataaatagagatctgtcacagaaaacaactggtataggacatcgtgatatattcatatactgatgacaaaggatttttatataaaaaacttcaatgaaccgagagcagatcaaagaaaagatggtatccgcaatggatctcccaaaagatgtgattcagaatgcttctgttataaccattttaggacgaaatgaattatgcattgaaaattatcggggcattattgaatacacagatacactgatccgtgtgcagacgcgggcaggacagatccggatccagggaaaacgactccggattcaatactacacaaatgatgagatgaaagtaactggagcattatcatctttagaatttaccgaggggaggaatccggggtgattcattgcctgatccgctacttgtccggttatgtgaagattcagatcaaaggatactccccagaacgatttctgaatctctgctgttatcaccgcatccgattctggggattgacccgtatcggaacaaattatgaattatacttgagtttatctgattttcgaaagattcgtccttatgtcagaaaaacacatacaaaagtcatactaaaaaaacggtatggctttcctttttttctttatcgctaccgaaaaagaaaactattctttatcagcatcttcctatgcatttttctaatcgattgttactcgcaatttctatgggatattcattttcagggaaataaaagatggaccgacacgaccttgacaacgtttctgaaagaagaggggatttatcctggaatgcaaaagaaaaatgtagattgtcaggggattgtcaaagcccttcgaaaggaatataatgatatcgtttgggtatctgcttctcttgatggtagccggttaaaaatacagataaaagaaaatgaagatgcgcttcctatcatctcatctactcagacagattctttacctgctgatcttattgcttctactgatggaatcattacaaatttaattacacgcaccggcattccccaggtacatatcggggattctgtaacgaaaggaactttacttgtatctggacggattgacatcctggatgacagtggtgaaattaccggatatcaatatacgcatgccgatgcagatattttcgctgatacacagatttcttatctggatataatttcctgttatcataataaaaaagtatatacaaaagaaacaaaaaagtccggatttattcaaatcggctctgtccggttagaaacatggaagccaaaaatgtccgctacttctgaaaaattgtgtatagcacatcagttaaaactgggagaaaatttttcacttccgattttttatgggcatgaaacaataaaaaaatacggcttcaagaaaataaaatatacaaaaaaagagatgcagacaattttaagcagtcgatttcgctatttttgtaaagatttagaggaaaagggtattcaaattaatgaaaaaaatgttaagatatatatatctgccgaaaaggcaacggcttcaggtacgctctatctgaatcagcagattgaagaggaaacagagaccgaaagaataactttagaaaggaacgaaccggatgagtctgtcggaactgatcattgatattccggctgaatacgagatgaatgtatttggccagtttgatacttatataaagaaaatagaaagaacttttcatgtcacattgatttcacgtgacggtgcaaccaagattgtaggagatacaattgctgcacagaaagcccagcgtgtacttacacagcttgtggaacttgctaaacgaggaaatacgattacggaacagaatgtagactatgcaatctcgctcgtatttgaagatcaggaagaagcccttgtttctattgataaagatctgatctgtcatacactacagggaaaaccaatcaaacctaaaacattaggtcagaaaaaatatgttgatgcaattcgtaatggaatgatcactttcggtctcggacctgccggaacaggaaagacctatcttgcgatggcaatggcaatcacagcattcaagcgcgaagaagtaagcagaatcatcctgacgcgcccggcaattgaagccggagagaagcttggatttcttccaggagacctgcaaagcaagattgatccgtatttaagacctttatatgacgcgctttatcagatcatgggagctgacagttttcttaagaattctgaaaaaggattgattgaggttgctcctctggcatatatgcgcgggcgtactttagataatgcgttcattatccttgatgaagcacagaatacaacgccggcccagatgaagatgttcttaacaagaattggttttggatccaaagttgtcattacaggtgattctacgcagaaagatcttccgtccggaacaatatccggacttgatgttgctgtaaaggttgtaaaagatctggaagggatcaacatctgtacgctgacaagcaaagatgttgtaagacatccattagttcagaaaattgtaaaagcatatgaggactatgagaagaaatcgtccagaccgagagaaaacaggaggaaaaaaggatgagtctttttatcgaagaagaggggaatataaagttagactttgatacagaagagattgccgcattagttattgacgctgcattagaacttgcagactgtccttatgaagcagagatcaatcttcttttaacagagaatgcccagattcacgaaatgaatctggaacaacgtggaattgaccgcccaacggatgtactttctttccctatgatcgaatacgaagagccgggagatttttccgtgattgatgaagaaagtgcggaagcctttaatccggaatccggagaattgatgcttggtgatatcgttatctcaaaggaaaaagtgttatcccaggctgaagaatatggacatttacccaaaagagagtatgctttcctgattgcacacagtatgcttcacttatttggatacgatcacatggttgatgaagagcgtgttgttatggaagcaaaacagaaagaaatcatggaaaaagtcggtattttccgctgataggatacatatattaaatagattttaaggaatgggacactaggaggaagttatgtctgaaactgaggcacaaacaacgaaaaaacgaacgaaaaaggatgattatattgtccagggttcgatacttgcagcagcagctgtacttacaaaaatcataggcgtagtctacaggattccgctgacgaatattttaggagatgaaggaaacggattttatggatatgcctatcaggtctatgcaatcgctctgatgatttcatcattcagccttccgactgccgtatccaagctggtatcgatccgacttgcaaagcgtcagagacgaaatgcattccgtgtatttatctgttctcttgcttttgcaatcggtgttggattattcatctcgctgacaatctttttgggagcaggactgatttcaacacatttaatgaaatctccacttagcgtttacgcactgcgggttcttgccccgggacttctgattgttgcagttatggctgttatccgtggatatttccagggaatgggaacaatgcttccaacagctatctcacagatcattgagcaggtatttaatgccgtgatcagtattgtcggcgcaagtgttctctttggcatcggaacaaaagcaggaaaaaaatccggagaggagcttctcggacctgcttacggtgctgccggaagtacacttggaacggttgtcggctctttatctggattgttatttcttttgtttgtcatttttttatataaaaatgtaatacgcaaacagcttaaaagagaccgcacccagaatgttgaaagttattctttccttctgaaagcattacttttaacagcaatccccgttgtattcagtaccgctgtatataatattaaccagattatcgaccttacaatctttaatcatgttatggagtcacaaggctatgtagagaaagaatatatggctcttcagggtatttacaccggtaaatacgacaccctgatcaatgtcccgatggcaattgcgaacgcacttggaacatctcttgtgccaagtcttacagctgttgttacagcaggtacaaagaaacaggttcacaataagattaaccagactttacgtcttacaatggtaattgctattccgagttgtatcggttatttcgtacttgcttccccaattatggttctgctgtacaatgactccagtgcaacaccggcgcgtctgttgatggcaggagctatcgttgttgtactgtatggactttcctctgtaacgaattccattcttcatggattaaactacatgacaagtcccgcaaagaatgctgcagcagctcttggaattcatctggtagcatttgtactgatgatgactatattcaagatgaacgtctatgcactggtgggtggaaatattgtatttgcacttgcaatgagtattttgaacctgctcaagattcgaaaagtcagcggtttcaaaatcgattttgtaagcaccttcggaaaaccattcgctgcagcagcagtgatgggcattgtaactttcggcgtattcagactgtttgatacactgatcggcggtcgcgtaattccggtatgcatttcactgattgtagcaatacttgtttatgcagttgttatgttgaagatcggaacactttctgaagatgatatccttgatcttccaatgggtggacggatcctgagaatttctaagaaattccatctgcttccagccgtaaaagtagaagaataaaaaaaataaaaaagccaatactgtatgaaaaaaggagcgatttgcgatgaaaaaatacatgattggctttttttctgttttatttctgattaccggatgtttgattgcaggttatcaggttagttacaacaatctactggaaaaggaaaaagctatagaactgactaaaaatgaaaaaaatgattccattcaaaccagacgcagttcagccaaaggagagtctgtttcagatgatgcctattatctgaaagagctgcatggatatgttgcggtctatctgcaagatgggacaaccctttacgaaacaaccagcctatccgtaaataatctgccggatgaagtacaacaggatctgaaaaatggaatctatcttaagtctgccgaagaactgtatggttttcttgagaattattccagttaaaaaagtggacgaagtgcacagaatcgtgtataatacagagtcagcggaaagaatatcggttactgttcacacgaggtgcgaccagcaacgcatcctccgtgtcaatcagcggagtgattaacacgggagtgaacagtaaagaatatcgcaacattaaacggaacaagaaaaaggagagagatagacaatggaacaaaagaagattgatcgtatcaatgaattatataaaaaatcaaaagcggaaggactcactccggaagaagcgaaagaacagaagattcttcgtaaagaatatatggaacttatccgagtgaacttaagaagccagctgaacaatattgacatggaacaaaaagatggaagtattgttaatcttggtgagaagtatggcgaaaaatatatgaacaagaaaggaaactaggatcatgttacagaatttaccacaggatcctgtcatccttctgagcgtcataaatacaaagctcagagatttttatccatcactggatcagttatgtaaagagatggaagtgaataaaaaagaacttacagataaattagatctgattgactatgcttatgatgcatcctgcaatcagtttgtataaaggaaatgagaatgaaagaaataattgaaaatgtaaagctggtggagaatgctccgttggaagagcctgcacgccagtattattttatggaaaaagcaaaagaatatgttgctgaaatgtctgagaaactggggcgtccattagtcgcggtaattcaaacatttggttgtcagatgaacgcccgcgactctgaaaaactgcttggaattttggaaaaagtcggttatgtagaaggaacagatgaagaaacagcagactttgttatctacaacacctgcactgttcgtgagaatgcaaatcttcgtgtttatggtcgtctcggacagcttggcgcaatgaagaaaaagtatcctcataagatgatcgcactgtgtggctgtatgatgcaggaaccggaagttatcgaaaagttaaaaaagagctaccgctttgtcgatcttattttcggcacacataatatttataaatttgctgagcttttaacatctgcaatgcagtctgacagaaccgtcattgatatctggaaagatacagacaagattgtagaagatcttccggttgaaagaaaatatcctttcaagtctggtgtaaatatcatgttcggatgcaacaacttctgtagttactgtatcgtaccttacgtacgcggacgtgaaagaagccgtgatccaaaggcaatcatccgcgagattgaacgccttgttgcagatggtgttgtagaagtcatgctgcttggacagaatgtcaattcttatggaaagaaccttgaagaaccgatgacatttgcacagcttcttcaggagattgaaaaaattgaaggacttgaaagaatccgtttcatgacttcacatccgaaggatctgtcagatgaattgattgaagtgatgagtaaatcaaaaaaaatctgtaaacatctgcatcttccggttcagtccggaagcagtcggatcctgaaactcatgaaccgtcattatgacaaagaacagtatcttgcacttgctgaaaagattcgcaaagcagttccggatatatcacttactacagatattattgtcggtttccctggtgagacagaagaggacttccaggagacgcttgatgttgtaagaaaagtgcgctatgacagtgcgtttacttttatttattcaaaacgtaccggaacacctgctgctgtaatggaagatcagattccggaagacgttgtaaaagatcgtttcaatcgtcttttacatgaggttcagacaatttccgcagaacaatgtgcaattcatgagggaacggtacagaccgttcttgtagagtgtgtcaatgaacatgacaatcacctgatgacaggtcgtatgagcaacaacctgctcgtccatttccctggggatgaaagcctgatcggtcagctggttgacgttcatcttgatgaatgtaaaggattttactatatgggaaggatagagagtaactaaatatggggattgttgtaattggggcagtttttatcgatatcaaaggatattcgatctcaccgtatattcctgccggaagaaatgtaaacaagaaggagttccattcgaagaaagagttcttatgaattatgatcatccggattctctggaaacagatcttctggtagaacatttaaaagaattaaaagccggaagagcaattgattgtccggtatatgactatagtcttcataatcgttctgatgaagtgattcgaatcgaaccaaaacctgtaattctcgtagaaggaattcttcttttagccgatgaacggattcgtgatcttctggatatcaaaatctacgtagaggctgacgcagatgaacgaattctccgcagaatatcccgagatgtggaagagcgcggaagagatcttaacggtatcattaaacaatacctgacaactgtaaaaccaatgcattatctgtatgtagaaccaacacgttccaaggcagacatcgtgatcaacagtggaaagaatgatgtcgcatttgatctgtttgtatcaaagattgaacaactgttggatgaaatgaatcaataattaagtaagaaaaaatgcatgagtatgaaactaaaaatcatacacatgtattttttcgtttatttatcatataacaagtgaaaagcaaacttgttcatgttataattgattcaaagaaaaatggtaaaaatactttgccaaacttgataaaatagcgaacaatgaggcagtacactagcaggagggcagaaaaatgtttaaaacaaaatgtaaaaaaacagtttcaaaaatgatcctatcattcatactgattacgttaactctattgtccggctgtcaaaagaataccacccattctgctattgaatttggaactatagatgtgtctgaaattgataaaatcgaactttctggcacaacaggtgggaaagatggaaatttttcctatacattgtcagatcaggaaaagaaggagttcgtccatttgctgaatcaagttgagcttggtgatgaagttgataaaaatcaagcattatcaagtggagcagttacttactataagctttatttccaaggaaaagacgtcgttacactctgtccgggacattatttcggtgttgatgaaaagtattatgagtttgttaatttcgataaattgtgggatgaatttgtcactttcaatagtaaacaagatacctctcagcaagacaaatgggattgttctgttacttgcgcagaaacctctgagacaaataactatgtagttacatattctgataaaaaagtattctcccaaactggaatactcacctttcaaaacagcaataatttcaatattattgttcatctacaaataccggatgaagaagaaagaacagcagaaattccagcgggcggtgttagttccttgtatcagatatcccaaaacaaggcatgtactgtaggtgtatacgctgatgttcctgaaaatgaaacgataaaattaatggtctatgatggagctgtagcagatttaaattcaagtcaggaaaaagaacaagtatattttgatgcaactgttcttgaagtaaagaaaaaatcaattaaggtaaaatgttcagaatcctttgatagtggtattcctgttgatgaagaattctctgtaacaacgaatatagtagaaagtggtgagctccctgatttgaatgccggtgaccatattcgtattgtatttgatggcatcatcaaggaaagttatcctctgcaacttggaaatgtctttgctatatatcttctagatgaaaacggaaacttgtgaagtccgtagtctgaaaggctcctgcaggagcctttcgttttttatgtcccaaaccaatatattttatggccataatatgaatgcgtgttcgaagtatgttatactgatactgattatgtgaggcgaggtgaattcaacttatgataaaaattgcaatcgttgacgatgaagaacagacaagagaacaaattctccggactctaaaggaaaatatacaggaacaatacgaagtagagattaaactatatgcatcaggcgaaagtttctttgaagaaattcagaagggcgaaacagcggatattttatttacagacattcagatgcaacagctggatggagtggaactggggaaattggtccgaaggctttgccctgacatgtacattgtcttcatcacatcttatgaagaatatgcggcagaaagttatcggattgaagcatatcagtatattttgaaacaggatctagaatttcgtcttcccggagttgctgaacagcttattgaaaagctgcaaaaacaaaagaaagaattctgtattataaaagacggtacagaacaggtgaaattgctttataaggatattctttatctgtataaatccaaaggtgctaagtatgtaaattatgttactacccaaggcgttgtgagagagcgaacttctttggaaaatgcactgaaaatgttaaatagtagacaatttcttctggtggaacgtggatacgctgttaatataaagcagatttgcagagtaagcggtgacactatctatctcgaaaaaggatatgaagtaccggtaagtaaggcaagacttgcagaagtaaagcgagaaatcaatctctactggaggaattcgtaacaatggatacacttggaatatgtattggactgaattttcttgaaaccttccttttctattatctgttattcggaacagttatagacagaaagactctgaaaacaaaagataaatggattctctattttgttttaatcgtcacttcaacaattatttctgtatgggtcaaaagatctgtgtttagtgcttatggatacctgttgacgattttaattttggttttgggaagtttccttgcctatcgaaagaatttgattcttcttacagggatcgcatctatgtatgaagcagcaatgatgttatttttatatatcattaactaccttctcgcatttatttatgggaatcaggcagaaaaccctcagattctatttttccgttaccatgaaaatgaagtattttgtgtgatacaaagcctgttattaattatttccttttttatcattttcaaaataagaagctggaagaagaaaaaagacatagaagcctttcaatgggtatttgttttatgtggtgtactgttgtcagcactcgttttggagtatcagaaacttttaaagtatggactactgtactccacagccggaattccggtgattcaggatgtcttaaaaggaagtctcatcagttttcttactatgatcgtgcttgtcatcgtcatgacatttcttatatggaaaaacagaaacataacgggacaaaatacatttcttctgatgaaagaagagatggagaagcaaaagtatgaggaaataagagcttccatcgagcagaacaaagaacttgttcatgatacaaagaatcattatcttgtgatcagtgaatatgtaaaaaatcaggaatatgaaaagctggaaaattatgtagatgaaatcagaagaaatttcgtaaaaatcaatccacagatttatacaggaaatcatgtagtggatctgattcttgggcaaaagcgaatcctggcagtacaaaaagggattgatttccaattggatgtaacaccactatccagtctgacgatggaagaaagagagatctgttcactatttgggaatctgttagacaatgccctggaagcctgtgagaaagtgactgataaagaacgtaagaaaatcagtataaagattgagcagcatatgcaaatgttgtttcttgaaattaagaatggaaccgataagcttcctgccaaatcaggacatacttttctgacttcgaagcaggataaatctcttcatggatatggcttgaaaagtgtggaacggattgttacacgatatgatggagatctggcctatgaaatggaagatggaatgtttgttgtttcaataacattttttgatttataaatactcatgtccagtaatccagtacttgaaggccatccgcttgcagtactttcaccacaagattaaactgaatgtaagaaaaaaacctgttccaaattttcaggatacgaaattcatatcacacaaacaggaatggaaatggaggaatgatgccatgacaattaagaaaaagagaactaaaatcattttaccatcgattctgacagtcagtcttacttgtggtctgttacttacgggatgtcagaaaacaccagatcagagtgcagttgtcagtaaggccggaggattaagcgaggatgtaattgcagaaccattgaaagatggagagacgcagacactgaatctgccggaacactgggacacaacagtaacatggagtaatgaccgcggagtttttcacgcagatcaggaattagaatctgttacgacaggaaatcttccggtaattgaagtcaatcagaaaaaactggagcttgaacaattaaacggacttatttcctattttgcaggcggagagattttgtatcagacgcaggaacttaccagagaatactatcagaacctcttagataagattaagaacagggaaggattctatgctgacaacagtgtggagtatgatttaacagggcttgaaaagttagtggaagaagttcttcctcttgcgccggagcagacaccattgcaggaaattggacagattgaatacacatcaaaaaagacagatccggcgtatgaagcaaaaagaaaatcactggaagcttacggaaatgatattcttccggataccacaaagcaggatggaatggagattcattttcaggcaacggttggtgcagatgcaaagggtacgatcaatgcagaaacttacgatccggaagcaggaaattatagtatcttctcctggtcagaaggaaatgggatcgaactggcaactattgaaaacactctcgcaagagagaatctcacagcccaatatggagttcctgcaggaagcgtaaaagaatcttttatggaaaaactacaagcactgaaggaccagatggaagaaacctctctcttagaagagacagcagaagatgaagctgaaaaagttctgaaagatctgaacctcgaaaatatgcagttgttgtcatcagacaaaatcctctggtatgcacagtctgattatccggaagccactatattagaaccacaggaagcattatggaatgctgatccaaatcttggaaaaacaggttatcgtcttacttacgttccttctgtttccggattaaaaataaatcaggataaaaccggaggatattcagatgatagtggatttgcatatgcaccttccatgccggtagagcagatttatattgtagtgacagaagatggaatccgttccttcaaatggaagggtatgagtcaggaagaaaagatagttacagaaaatgtaaaactccttgcatttgatgaaatagaaaaccgcctgatcgatcaggtgaaatatctttacccttccagtcagcctgctgagaacaagacgatatttggttatgatgttgcaactgtcgaactaggatatacttatataccggcatataagaatccacaaaatgcctggctggttccggcatggtttttcactataagcgagagtgaagatacaactgccgaacttggaacagccggaaaaaaaatagaaggatatcagaccgactacattgtattgaatgcaacagacggtggaagaataggttcttattggagatgatagaatatgaaacgaagacatcttttcagaacagaattgaaatatgactttggaaaccgaagattttatatctctgtactggcgttgtgtgcggttcttttgattgttgcacttccttatcgaaatcatctgatcgctttcggtggatcaacagaagggaaagcctggttatgcaccttcacctatgcaatcacttcagaaaaagccttgcttttctttccactgttggttcctctggcaacagccgcagatatacaggaagaattacacagccgctatgcatggtttcttattaacagaataggaaaaagaaattatatttggatgaaaagttttggagtcgcattcacaggtggtgccatttccgtttcagcggcaggaattgcattggttgtttttatagttatctgtagaaatatcccgactctgaatactttgcaaaatatatcagaggtaataagtatcacaggaattggatttatccgactttttctaaatggagcattgtggtctttatgcggttcactgacagcagttttgactaaaaataagtatctgagctgtgctgttccatttattttatattatgtactaacagtgtttcaagaacgatattaccgcaattattttttcctaagtccaaagcagtgggcaagcccggcatattatggaaacggattctgtcttttggctctgcttctgatcagcagtcttctggtactggctttgcgtaaatgcgtggtaaggagagtggtggcatgaaaaaatcgcaatttaaaatggacattcatcaaatctttcttctaacaaaaaggaatttctctgactggggcaaaaatccgagaatctggatgacttttgcattaggatttgtactttgtctgatgttgacaaatcagattttagagcaggcacagacattccagacaccggttcagatgttcgagccactgatctggaccttcggtgatgcgcagtccgtgatgctttcatcccttttactgctgttattatttgcagatatgccttttgtaaatcagatgacaccctattggctgatccggacaaagcgaagcgtatggatggcaagtcagatcctatatgtgatcctggctacttgcctttataccgtcttcctctgcctgacagaacttctaattgcaagtccctgggcttacgttggaaatgtatggagccagaccgctgcaagcattggatatggaaataataatcatcttacggttcctgtgtcaataaagacaatggaaatgacaacaccatataaatgtgcaatctgtgttgtatttcttatgcttttttattcgttatttattacttccgtcatgcttgtattaaatctacagaagggaagagccggaggcgttgttggcgcactcttgataaatctttatggaattcttctgactccggatatttttcaaaaagtttttcatctgggtggagggctttcctatcgggcaaatattctttgcggatggttatcacccttaaatcacgcaacatttccaatgcataatttcggatatgattatttgccacaaataaaaataagcatcctgttattccttgcagtgatatgtattttgcttttcatctcgagaaaatgtatcaaacgatataattttacattttctcaggttgatgaatcctgacggaataagaaaggggaaaattatgaaagctgctgtgaaagttaaaaatctaacaaaatcttttgggaaagaaaaagtattaaaaggaatcagtcatacctttgaggcaggaaaaatccacggaatcatgggatttaatggctccggtaaaactgtaatgttcaaatgcatctgcggttttcttcaacctgacagagggagcgtatatgtctatggaaaaagaattggaaaagatattgattttccggaaaataccggaatgattatcgagagtccgggatttcttccatatatcagtggatatgaaaacttaaaacgccttgcacaacttaatcgaaaaataggagatactgagatccgggatgcaatcgcaagagttggtcttgatccgttttctaaaaagaaagtaggtcaatattcactcgggatgagagaacgccttggaattgcacaggcgatcatggagcggccaaaattattaattttagacgaaccattcaatggattggataaaagaggcgcacaggatgtctgcgaactctttgttgaattgaaagaaaaagggacaactattctactagctgcacataatgtgatggaaatggaatggttgtgtgatacggtatgcgagatggatgccggacagttagaagttgtttatgaaaaatgaaataataattttttcaaattgaaagaagagagcgaacccaagaatattaaacgaatattcttcagttcgctctcttcgcacattgcgatataggtactccgacaaaatgatacatttctacgttctcaacatcttcaacatcagcttgaaattcatgttaaaatttgttagaatgatttgcgaacttacattctaaaaagtttttagaaaacccttgaaaactaaggagaaattgatggaaaatattgacatagataagctgacgcccatgatgaaaatttattgcgagacgaaagagcagtacaaggattgtatcttattctaccgcctcggcgatttctacgaaatgttctttgacgatgccttgactgcatcccgagagcttgagatcacactgaccgggaaaagctgtggtctggatgaacgtgccccgatgtgcggaatcccataccatgccgtggaaggatacttgaaccgtcttgttgcgaaaggatacaaagttgcaatctgtgaacaggtagaagatccaaagactgcaaagggaatcgtaaagcgtgaggttgtaagaattgttacacccggaacgaatctggatacacaggcattagatgaaacgaagaataattacatcatgtgtatcgtctatattgcagaccgctatggagttgcaatcgcagatatttctaccggagattattttgtcacagaacttccggacagcagccgtctgatggatgagatttataaattcagtccatctgagatcatctgcaacgaagcgttctatatgagcggtatggatctggatgcgatgagagacaagcttgggatcacgatttattctctcgattcctggtattttgatgatgctgtctgcaaagataagctgcttgagcatttcaaagtaaagaattttgcagggcttggacttgctgattatgactgtggaatcatcagtgccggagcacttttgatctatttatttgagacacagaaaaattcactttccaacctgacacatattacaccatatatcacaggaaaatatatgctgattgacagttctacacgtcgaaatctggagctatgcgaaactttacgtgaaaagcagaagcgtggttcccttctctgggttcttgacaaaacacgtactgcaatgggcgcacgtacgcttcgcaaaaatgtagaacagcctttgatcgataaatccgagatcaaccgcagactggatgcagtggaagaactgaaaaatcaggccattgcccgtgaagagatccgggaatatttatctccggtctacgatctggagcgtctgatcacaaagatcacttacggttctgcgaatccgcgagacctcaccgcattcaaaggctctctggagatgctgccaccgatccgctatattttacaggatctgcaggcaccgcttttaaaagagatttatgaagatctggatgcattagaagatctatgcgagctcgtcacgaaagccattcgtgaggatccgccgcttgccatgaaagagggaaatattatccgcgacggttataacgaagaagttgataagcttcgccgggcgaaatcggacggaaaagactggcttgcaaaacttgagaatgatgaacgagaaaaaacaggcattaaaaacctgaaaataaaatacaacaaagtcttcggctattatctggaagtgacgaattcttataaagatcttgtcccggattattatacaagaaaacagacccttgcgaatgctgagcgttatatcacaccggagcttaaagaacttgaagacatgatccttggtgcagaagataagctgtatgcactggaatatgaactttacagcgaagtccgtgaaacgattgccggacaggtggagagaatccagcaaactgccaaagcagttgccgcactggatgcgttcagttctcttgcacttgttgcagagcgcaacaactacgtccgtccgaaaattaatgaaaaaggaatccttgatatcaaagaaggccgtcatccggtcgttgagcgaatgattccaaatgatatgtttattgccaatgatacttatctggatgataagaaacatagaatttcaatcatcacaggtccgaatatggcaggtaaatcaacttacatgcgtcagactgcattgatcgcactgatggctcagatcggatcgtttgtcccggcagagagcgcgaacatctgtctttccgaccgtattttcaccagagtcggagcatccgatgaccttgcttccggacagagtacattcatggttgagatgaccgaagttgccaatattttaagaaatgcaacctcaaaaagtcttctcattcttgatgaaatcggacgcggaacaagtacatttgacggtctgtcaattgcctgggctgttgtagaatacatcagcgacagcaaactgttgggagcaaaaactttattcgccacacattatcatgaactgacagaactcgaaggaaagattgataatgtcaacaactattgtattgctgtaaaagaaaagggcgatgacatcgtattcttacgaaagatcgtaaaaggcggggctgacaagagttatggtatccaggttgcaaaacttgccggcgttccggatcttgtcatttcccgtgcgaaggaaatcgtagaggaactcagcgatgaggatatcacaaaccgcgtcagtgagatcgcggccaaggaacatactgcaaagaaaaaaagtaaggcaaaaaaatatgacgaagtcgatatggcacagatgtctctgtttgacactgtaaaagatgatgacgtacttgatgaattgaaaaatatcgatgtcggaaatcttacaccgatcgatgctttaaatacaatctaccggttacagaataagctgaagaaccgttggtaaaaggaaaggcggaaatatgccacacattcatgtattagaccagatcacaattgataaaattgccgcaggtgaagtgattgagcgtccagcgtcaattgtaaaagaactcgttgaaaatgcgatcgacgcaggatctacttctgtaaaaatagagatcaaggacgggggcatttccttcatccgtattacagataatggctgtggcattccgcaggatgaagtgcagcgtgcttttctgcgccattctacaagcaagattgagacagtggaagacctgtctcacatcgcgtctttgggatttcgtggagaggcgctttcaagtattgcagccgtcacccggacggaactgatcacaaagacagccgatgcagagtttggtacccgctatgtcattgaaggtggaaaagaagtatccttggaagataccggtgcgccaaatgggacaactttcctcgtccatcagttattttacaatgttcctgccagaagaaaattcttaaagacaccaatgacagaagccggacatgtgcaggatctcttgatgcaccttgccctgtctcatccggaagttgcttttcagtttttgaataacggacaggaaaaacttcgtacttccggaaacggaaaactgaaagatgtgatctacaatgtctatggccgtgatgtggcagctaacctgattgagatcgattatgagaaaaatggtatccatatcacaggttttctcggcaagccgatcatcacacgtggaaatcgtaactttgaaaatttcttcgtaaacggccgttatgtcaaaagtgcaatgatctccaaatccgtggaagacgcttatcgtgattttgtgatgcagcacaagtttccatttgcagttctgcattttcatctgagtggagaaaatgtagatatcaatgtgcatccgacaaagatggagcttcgcttctcacggcagcaggaggtttataataccgtctttgaagccgtacacaggactttgctggaaccggaactgatccagaaagcagaagttcctgatccggtggaatcgaacgaaaacaaggcagaaagaccggagcgagtgaaaaagacattcacatctgcttcgaccaaagataaagaggataccggcagtccgtttcttcttcgtccgcgtaaggagaatgaaaaagtaacagctgcggaattgatcaaagaatccagggaaacggttaaggatgatattcaagatgaggattattttatccgtaagatgaaggagcgcgtactttcttaccataatcgttcttcttccgccgaagttgcagaccggaaagagattttccgtgcagatgaacagaaagacaaaattgctgaacatgtcaaatacgccgttgaagcagcagataagacagttgcaccggaaactgcggcagcagttcaaaaatccaaaccagctgttgaaatgcaaactgccaccaccagcaccgatgcagcatctgattgtgaaataaccgacgcaaaatcagaaccagagaacggtacgcagatggatctctttgaagaaaatttcttaaaaagagatatccgtgcagaatataaattgatcggccaggtctttgacacctactggctcgtagaattcaaagataatctctacatcattgatcagcatgcggctcatgaacgcgtcttgtatgagcgtaccttgcgtgaaatgaaaagcagagaatttacttctcagtacttaagtcctccgatcattttaagcttatccatgcaggaagcacagcttctgaatgaaaatatggaccgcttttcacgcattggtttcgagattgaaccttttggtggagaagagtatgcagtccgtgcagtacctgacaatctgttcagtattgccaagaaagaacttctgatggagatgatcgatgacctgaccgaaggtctttctacttctatgacaccggagctgatcgatgagaaggttgcatccttgtcctgtaaggctgctgtaaagggaaataaccgtctttctgcacaggaagtagacaaactgatcggcgaactcctgacactggacaatccatatcactgtccgcatggacgaccgacaatcattgccatgacaaaacgtgatctggaaaagaaatttaaacgaattgtataaaaggaatcgaggaaatatagatggaacagacaaacaaacgcccacttgtcattctgaccggaccaactgctgtcgggaagactgctgcctccatcggacttgccaaagcgatcggcggagagatcatttctgctgactctatgcaggtctacaaggagatggacatcggctctgccaagattcgtccggaagagatggacggtgtgccgcatcatctggtagatgttcttgatccgtctgaggattttaacgttgttctctttcagcagatggcaaaagaagcaatggaaggaatctatcagcggggacatattccgatcgttgtcggcggaacaggattctatattcaggcattactttacgacattgatttcacagaaaataatgccgatactgcttatcgggaagaattagaagcacttgccaaaacccagggtgcagaatatcttcatgaaatgcttgaaaaagtagacccggaatctgcggaacagattcattttcataatgtaaaacgtgtgatccgcgcgctggaatattatcagcagaccggacagaagatttccgagcacaatgaggcggaacgtgagaaagaatctgcttataactccgcatattttgtgctgacagatgatcgtaagattctctatgaccggattgataaacgtgtcgatctgatgatgcaggaaggacttcttgaagaagtcaatgcgttaagattgcgcggacttaaaaaagaaaatgttgcgatgcagggacttggatacaaagaactgtttggttattttgaaggagagtatcctttggaagaagccgtacgcattattaagagagacacaagacattttgccaagcggcagctgacctggtttagaagagaacgagatgtcatctggcttgataaaagtgagattggaagagaagatgaacaactgatccaacagatgctcactgttttaaaggaaaaagatattattcattaggatatcaggctgcatttagataaaatgcagctttgccatgtaaatcaaacgataaaaaacttaaaaagaaagaagaagaaaaatgaatacaccaactacagaaacaatttatgaacagctaggaatcagcaaagaagtctgggcgttcggacagaagacagaagagaaactaaaagaacgttttgaagaatttgacagaaacgctgaatacaatcagttaaaagtaattcatgccatgcaagaaaaccgcgtaagtgaaggatgctttaactatgtaagcggatatggatacaatgatcagggaagagatactttagaggatgtctatgcctctgtttttcatacagaagctgcactcgtacgtccgcagatcacttgcggaacacatgcgcttgcgcttgcgcttgcagcgaatcttcgtcctggagacacactgttatctccggttggaaaaccatatgatacacttgaagaagtaatcggaatccgtccatctaacggctctcttgcagaatatggaatctcctataaacaggtagaacttctggaagatggatattttgattatcctgcgattgaaaaagctctggaagataaaacaatcaaactggcaacgatccagcgttccaaaggataccagacacgcccaagctactctgtagaaaaaatcggcgaactgattgcatttatcaaagagcgtcgcccggatgtcatctgtatggtagataactgttacggtgaattcgttgagcgtatcgagccaagtgatgtcggtgcagacatgatcgtcggttctctgatcaaaaatccgggtggcggacttgccccaatcggcggatatattgccggaagagctgatctgatcgaaaactgtgcttatcgtctgacttctccgggactcggtaaagaagtcggtgctacacttggtgttacacagtccttctatcagggattcttccttgcaccaactgttgtatgcggtgctttaaagggtgctacttttgcagcaaatatctacgaagctttaggatatccggtaattccgaacggttctgaatcccgtcatgatatcatccaggcggttacacttggatcagcagaaggtgttattgcattctgtaagggaattcaggcagctgctccggtagacagttatgtaagcccagaaccatgggcaatgccgggatatgacagcaatgtaatcatggcagctggtgctttcgttcagggttcctcgattgaactgagtgcagatggaccggtaaaaccaccgtatgctgtctatttccagggtggactcacatggtatcatgcaaagcttggtattctcaaatcactgcagagcgttattgatgcaggtgttctttctatcgagcgtgtgagagaacttctgtaaaacaatttttcgagagaattctatcgaaaattcagttgagttgaatgaattgttatgttaaaattcagacagatgtaatctgctaagaaagtaagaggatatgaattttaatgaacacaattgcaattataggtggcggtgcatcaggaatgatggccgccattttcgctgccagaaaaggagcgaaagttctccttctggagcaaaatgatagattgggaaagaaaatattagtgacaggaaatggccggtgtaattatacaaacacttaccaggacgcttcctgttatcgttcggagcagcctgactttatcacgcgggtactggatcagtttccggcagaaaaagtcattacttttttccgagaacttggaatatatccaaaagacagaaatggatatctgtatccgtactctgatcaggcaagcgcagtccgtgatgtattagaacaggaagtataccgtcttggagttgatgtacgtacaggaatctcctgtactggaatacagaaaacaaatgaacgattttccttgcagacatcacacggttctttaaccgtagatcaagtgattctctgcaatggttcaaaagctgcaccttccaccggttctgacggttccggatacgctttagccaaacagcttgggcatcagataattcctgtacttcccgctctttgtgctttacattgtaccggaaagcatttccacgcaattgccggagtacgtgcacagggaaaagtttcgttgtttgttgacggtgaattaactgctgctgataccggtgaacttcaattgactgcctatggaatctcaggaattccggtattccagatcagccgctatgcatcgaaagcattatatgagcagaaggaagttgttgccatgctggattttcttccagaatattcggttgatgaagtgaaaattcttctgaaagaacgtgccaaccgccagccagaaaaaacagcagagcagttctttaccggcctgtttcatgaaaaactggccgctgtatggctgaaatttgccaagatcaaaaaagagaagctatgcggcgacttcacagatgcagatattcagaggctggcatggatgatcaaggaattcaaatcacctgtaattaagacaaattcttatgaacaggcacagatctgctgtggcggtgttgatacgacacagattaatccggaaacgatggaatccagacttgttccagggctttattttgccggagaactgatcgatgtagatgcaatctgtggtgggtataatctcacctgggcgtgggcaagcggttatgttgccggacagtctgccgcatctgcataatcgcctgctgctaacttgtaaccaatatctggatgatatattttaatattagatttcctgaaagaaaggatagataaatgatacgaattaatcagctgaaactgcagattccacacacggaagaagctcttgaaaagaagatacaaaagacacttcatctaaagaaaggggactcttttacttatcggattcaccgtcagtcattagacgcacgcagaaaacccgaattattctatgtgtatacggttgatgtcactgtttccaatgagaatgctgttttaaagcattgtaaaggaaacatccagaaagtagaagagaagcattaccagattccatcccacggaacagagactctgaatgcccgtccggttgtcatcggcagcggtcctgccggactattctgcgcttatctgctcgcactggaaggatactgtcctttggttattgaacgtggtgcctgtgtagaagaacgtaagaaggatgtggatcgtttctgggaaaccggtgtgcttgacacttcttccaacgtccagttcggtgaaggcggcgctggtacattttcagatggaaagttaaatacacttgtaaaagataagacaggacgtaaccgtttcgttcttgagactttcgtaaaattcggagcggacgaagatattttatatgcaaataagccgcatatcggtacagatgttctgattgatgttgtaagccagatgcgtcaggagatcatttcgcttggcggtgaattctgttttcatacacaggtcacagatgttaatctgacatcaaaaacactgaaaattgttcacctctcagagaattccgcagaagaagtatctgccggagcagccatttttgcgatcggtcacagcgcccgtgatacatttgaaatgctttataagcatcagattccgatgcgcgcaaaatcatttgccgtcggagtccgtatcgaacacccacaaacattgatcgatcattctcaatatggaagagatcggggaaatgatcttccggcagcagcatataaactgaccgagaacttggacaatggaagaggagtctatactttctgtatgtgcccgggcggatatgttgtaaatgcttcttctgaagagcatcgtcttgcagtcaatggaatgagctatcacgaccgtgccggagaaaatgcaaacagtgctgtgattgttacagttactccggatgacttcggttctgaacatccgcttgccgggatttctttccagcgcagcttagaagaaaaagcttatcaggcaggacagggaaaagttcctgtccaacgttttggcgactttaaaaaagatcagatcacaacttcttatggtaaggttcattcttgcatgaaaggggcttctgtctttggggatgtacgcggtatctttccggaagaaatcgcacagtcgcttgaggatggaatcacagcaatggatcataagattcatggatttgcagataatgatgcattattatccggtgtggagagccgaacttcttcccctgtaagaattgaaagggatgagaactttgtctgtgcttcctgtgactggatctatccatgtggtgaaggggccggatatgccggtggaatcacttccgcagcgatggacggaatgaaggtcgccgaggcaatcattcaaaaatataaatcttaatcatttatgaaatttgtggttttttggtatcttctctatacacttttttgaaactgtgctaaaatgaatcgttgtattatgtcatcgcagtgatatgattcacatggaaaatagaaatacagaaacaatcaaaatgatgtatcttgaagaccgtccttatgaaaaatgtgagcagtacggtgcagaacatctgacagatgtggaacttttagctgttttacttcgtaccggaacgaaaggggagaattcgcttcggcttgcccagaagattctgcatccaccatttggctctgaaggacttctcagcatcccacagtggtctatggaacaactgctgaagctcaaaggaatcggaaaggtaaaatccatccagattctttgtctggcagaacttgcaagacgtatggcgaaagcagaagcctcactgggattggatttttcctctccggacagtattgcacgttattatatggaggatcttcggcataagaaacgggaagtaatgaagcttttgcttctgaataccagatccaggctgatcagtgagatggatgtttcaacaggaaccataaattccacacttgtttctccacgagaactgtttgtggaagctttgcagaagaatgctgtatccattattcttttgcataatcatccgagtggagatccgacaccaagcaaagaagatcttctgacaacccggcgcgtccgtgaagcaggggctttgattggtatagaacttctcgatcacatcattattggagataattgttatttcagtttaagggagaaaggattcttttctcaagaatctgcaaatagataagggaatggagtgtatttatggccaggaatgtatatgggttagatcttggaacttatgatatcaagatttttgataagaaaaaagaccgcatatggcatgccaagaatgtaattgccatgaaagataaaaaatatattttttctgtcggagacgatgcttatgagatgtatgaaaaggctccgggaaatatacagatcatatttccgatgaagaatggtgtcattgcccgttttgatgacatgcaatatcttctcggagatcttttgaaggaagagcgtccgtttatccgtggggcagaatatgtgatcgctgttcctacagatgtcacagaagtagaaaagaaggctttctatgatcttgtgcttcattctgaagcgaaagcaaaatcagtaagaattgtagagcgcggtctcgcagacggacttggacttgggattgatgttctggaagaaccgggagcttttatcgccaatttaggtggaggaacaacagaactttccgttctttcctacggtggtattgttatgaaccgtctgcttaagatcggtggcgaacagctggatagtgcgatcgccaatcttgtccgtcattctaaagattttataatcggacgtccgactgccgagcgactgcggaaagaatttggagtttttgaccagtccaccggaagtactcttactgtatacggcagagatatgatgcgcggcggtccgtcgcacattgacattccaatcagtcttgtacgggcagcgatcaaagaacctttgagagaatgtgtacaggccattcattccatgctcgaccgtacgcctcccgatgtccggagaaatattaataaaaacgggatttatattactggaggacttgctaatctgcgagggatttctacttatctggaagaaagtatcggtctgccggttcacatgaaaacagaccctgaactctgtgccgtcaaaggtctacagaggatcatactgaataagaccttgtatagaaaattaagttactccatgttagacgaagattataggtggttaagataatatgaaaaaaaagaagaatcagacttctgttatgaacagatatttacttataggactttctgttttctgcatttttatgatgctgttatcttccttttcagacaaagtaggaggtccatttaaagttgttgcaaatgtaaccgttatccctcttcagcagggaatcaatcagattggtggctggatgggagatatgaaagacaatttccaaactctgaaacaggtacgcgcagaaaatacaaagcttcagaaacaggttgactctctgattacagaaaataacaatctgcaacaagaacgttatgagcttcagagactgcaggaattatatcagttggacaagaactatgcggattacaaaaaaactgctgcgcatgtaatcgggaaagattccggaaactggttcagtacatttaccattgacaaaggaagtaaagacggtattgccacagatatgaacgtaatggccggaagcggtcttgtcggcattgtcacagaagttggtccaacctgggcaaaagtccgttctattatcgatgattcaagtaatgtaagtgcaatggtactttctacttctgaccgttgtatcgtaagtggagatctgtcacttatgagtgataaccagattcgttttggtcagatggaaaacaatgataatacggtttccgtcggagaccagatcgtcacttcttatattagtgataaatacctgcagggaatcctgatcggatatgtcagtgaagtaacggtcgactctaacaatctgactcgttccggatatattacaccggctgtagattttaaaaatcttcaggaagttcttgttatcacaacaacgaaagcggatttggttggatccaatcagagcgaataggagtgaatactcatgaaattaatgaaatttaaaagagttgctgtaactgtactgatcgtacttgcagcatatctgctccagtgtaccttattcaatcatctggaacttgccggaattaaacctaacctgattctgattgtcacagcatcctttggttttatgcgtgggcagaaagaaggaatgctggtcggtttctttgccggccttatcacagatatccagtttggtacaattttgggattttatgcattactttacctggtaatcggttttgtaaacggattatttgaacagctttattttgatgaagatatcaagctgccgttatttttgatttctgtcagcgaatttctctacggtatcatcatttatttgctcatgttcatgttgcgaagtgattttaactttttatattatctcaaccgcatcatcgttcctgaactgatttacacaatcgtgatcacactgggattatacccactgattttatttattaaccacaaacttgaagcagaagaaaaaaggagtgcaagtaaatttgtttagaaatattttagaccgtctgaaagaagccggagcttacctgatgcagtcaagactcgttactttgatcattatattttgtgtcagttcttccatcctgatcggaagattattctatcttcagattgtaaaagggtctgattatcttgaaaactacgaatattctatccgccggacgacatccgttgcagcaacacgcggaaatatttatgaccgtaatggaaatctgctggcttataaccagctggcttattccgtgacaattaatctgtcaaccgttgaaaactccatcacaacagataaacgttctgaaaaaaatgcggcattaaataaaatcctagatcaggttctttctatcgtagaatcaaatggagattctgttgtttcaagctttggtatcatcctggattcctccggaacctatcagtttacacagtcaagcgatacccagaagctccgttttattgcagatgtctatggaaaacgaacaatagatgaacttacaaaaaaacagcagaaccaaagtgcagcggatatcattcattatctttgtaccgatgaaaaatatggatatggccttgatgacagcacattagagcctgcttatattttaaagatcatcaacatgcgttatgcaatggcattaaatgcatatcagcagtatattgatacagttcttgcatccgatgtaagtgacgaaacagcagcagcaattatggagaataaggacgttcttaccggtgttgacatttcagaagattctatccgaaaatataccgatggaatgtattttgcatctattatcggatataccggacagatttcccaggatgaatacgatgcgctggacaaggatgaaaagaaaaagtactctctatctgatattgtaggaaaggccggcattgaacaaagcatggacaatgtccttcagggcacaaaaggtgaaagaaccgtgtatgtagataacctcggacgtgtaactgatactgtcagccggaaagatcctgaagccggaaatgatgtatatctgacgattgataaaaatcttcaggaaagtacttataaacttctggaagagaagattgccggaattgttttatccaaactacagaatgttctggaatacgatacatccagtgtagatgactctaagaatctgatcatcccggtcagcgatgcatattataatctgattggaaattccgtcatcgattcaggccacttttcaagtagtgatgcaaaaactgccgagcagcaggtttattccatttttcaggaaaagaagacggcgacgatttctgagctcgaatcagaacttcagaactcacaggccagcgcatatacagatctttccaatgaaatgaaagcatatatggattacatctgtgataccctgctgacaaaggatacaggcatccttatgtcagatcagattgataagaatgatgctacttatattgcatgggcaaaagatgagacaatcaatttatatacttacctgaattatgcgatttctaaaaactggatcgatacttccaaacttggaagcagttcttattccagttcagaagagatttatcaggagattttaaaatatttaaaagaatatttggcagatgacagtaatttcgacaaacttctctacaaatatcttataaaatcaggtagtgttactggtgaacaagtttgtgctatcgtatatgaacagggtgttcttcctatggatgactcgacatataacggattactcaacggagagacaaatgctttttcctggatcaagagcaagctggaaagccttgagcttacacctggtgaactggcacttgagccatgttctgccggtgcagttgtaacaaatccaaataccggagaagttttagcatgtgtttcttatcctggatatgacaataatcgtctctcaaacgtaatggatcgttcttattatgtgcagttgagcatgggtatgtcacggaccttctacaacagagcgacccaggagaagacagcaccaggttctacttataaaatgctttcttctgtagccagtctgacagaaggggtaattaatggaaactcctatatcagttgttcaggtgtatttgacaagatcacaccaagtccaaaatgctggatttatccaagtgctcatggaagtctgaatgtagtaggtgcactgcagcattcctgtaatgatttcttctatgaagttggttatcgtcttggacaagactcgaatggtaactatgacagtgataccggccttgaaaaactggcaaaatatgcaaaaatgtttggatttgaccagacgtcaggaatcgaaattcctgaatcacaacctcagatttctgattttgactctgtacgatctgccattggacagggtaccaacaactatactgtcagccagatcaaccgttatgtaacagccgttgcaaaccgaggaactgtttacagtctttctcttattgacaaaacaaccgattcgaatggaaaactaatcaaagattatactccggaagttgtaaatcagatggatgagatcagctcaagtacatgggatctggtacacaatggaatggaaagcatggtaaaaagcagctccacctttgccggaatggatatttccatgggaggaaaaaccggaactgcccagtatagtaagatgcatgcagataatgttctgtttgtcggttatgcgccggcagattcacctgaaatttcaattgctgtccgcattgcaaatggatatgcgtctacctatgcagctgaaattggaagagatatcacaaaagtgtacttcaatccagaatccgccgatgaactgcttcaaggatatgcttcttctttaggaactgcagaagccggtgattaattaagataacgaaaggggatgggatcatgagtgaactggtaacaataaaaagcagtcattccggtatagagctgcggcttaatgccaacctcccattcccggatcttttgaaagctgtagaagagaaattccgacaatctgctgattttttcaagaatgcaaagatggcagtttcatttagcggaaggacactttctatcagcgaagaggagcagttaatacaggttattacgcagacgacaaaccttgagattatctgtatcattgatcatgatgaacgcaaggaactgatctacaaaagagcggtagcacagtgtttatctgaacgtgagaaatcagatggacaattctatcgcggaacattaaagcgaagacagcttcttgaatccgaatccagcattgtgatcttaggagatgttgaattcggagctaaagtagttgcaaaaggaaatattatcattctcggtactctctatggatctgttcatgcgggagctgccggtgacaggaatgcttttatcattgctctctccatgcagccgcagcgacttgtaatcggagatattgaagcaaaacgtcaactgatctatcaggacagcctttccatcaacggaccgcaaattgcagttgttgacggaaaaagaatttaccttgatccactgatagaataaatctttggaaagacataagcatgggaaataggaggaatattcaacatgggtgaagtaatcgtcattacatcgggaaagggcggtgttggaaaaacaacaacaacagcgaatattggaattggtctgtcttcagcaggaaaaaaagttcttgtaattgatacagatctcggacttcgaaatctggatgttgttcttggacttgaaaatcgtattgtctacaatcttgttgacgtcattgaaagcaaatgtcgtctgaaacaggcagtgatcaaagatacgcgatttgaaaatctgtacctgctcccatctgcccagacaaaagataagacaagcgtatcaccggaacagatgaaaaaactgattgacgaactaaaagatgattatgacttcattcttttagattgtccggcaggaattgaacagggttttaaaaatgcaattgcaggcgcacagcgttccattgttgttacaacacctgaagtttcctcaattcgtgatgctgacagaattattggattacttgaagcttccggaatccggaaaaatgaacttctgatcaatcgtctgcgcgttgacatggttcgcagaggtgatatgatgtctgtagaagatgtcacagagattctagcgattgatctgcttggagtcatccctgatgatgagtctgttgttgttgcaaccaatcagggagaaccggtagtcggcgaagattccttagccggaaaatgttaccagaatatctgtagacgtctgttaggagaagaagtcccgatttccgattttaatcataaacccggacttcgcagtaaactctccagtctttttcataagaactaggaggtcacattatgagtgtaccttctgttacaattgcaaaagacaggttgcgaaatttgctaattactgacagaattcaatgtacacccgatatgatagaatttctgacatcggatttatatcagacgatttctaaatacatagaaatctccccggaacaatttgatgtcaaaataacacgcacggatatacatataaaatatacaggagaaaaacattgaaatcattttttactaatttgaaacagcgttataatattagagattataaaatcagtctggtttttctggtcactctgatttcactggtcggaatccttatggtccgaagtgcaagacctgatttaatgaatcgtcagattatgggcgtttgtcttggtctgattgttatgtttattatctctttcattgattataaatggattttaaacctatattggccgctttatgctctgaatattgttatgctcctggctgttttggtttttggaacaaaagtaaatggcgcgagaagatggctgaaccttggatttacacaattccagccttccgaccttacaaaaatccttatgattctgttctttgcaaaattcttaatggaacgagagcaaaagattaaagaacccaaaacgattattcaggcaattgctttaatccttccatcacttgcattgatttacaagcagccaaacttgtctacaacaatttgtattgccgcattgtttgctgtccttctttaccttggaggattaagctacaaactcattggaactgttcttgtaatcacaataccgacgatcatcatactgcttgttgttgcaatacagccaaaccagccgttcttaaaagactatcagcaggaacgtatccttgcatggctggaacctgaaaagtatgccgacgacgaatcttaccagcagttaaattccgttatggcaattgggtccggacagctgaccggaaaagggtatgataatgacgcaacaacatccgttaagaacggaaatttcgtatctgaaccgcaaacagactttatttttgcaataattggtgaagaattaggatttgtgggttgttgtggagtcataattttgttattattaattgtgatagagtgtatcttaattggtttgaaggccaaagatacaggagggcggatcatttgcggaggtgttgcttcactgattggaatccagagctttattaacgtcagtgtagctacaatgatttttccaaatacaggcttgtccctcccatttgtcagttatggactgacttccgtagtatgttttttcatgggaatcggttttgtattaaatgtaggcttacagcctaataaatatcagtaaagagaggataccactatgaatatcggattagtagcgcatgatgcgaagaaaaaattgatgcagaatttctgcattgcataccgtgggatactcagtaagcataatttatatgcaacagaaaccaccggtatactggtcgagaatgtaacaaacttaagcattcacaaatatcttgctggacatctcggaggaaaacagcagctcggctcacagattgaacacaatcagatggatcttttgattttcttccgtgatccactgacacctcactcacatgaaccggatgttaatgacattgttaagctttgtgatatttataacattccgattgcaacaaatatcgcaactgctgaagcattgatccttgctcttgacagaggcgaccttgactggcgggagatgtatcgataatatgagtaaaccatacaaaaagaagagaagacgaagaaagcaacggcattctgtcagccgcatacttattcctgtcatatgtcttattgttgtattgtccggagctgtcggcggagtctggtattacaaagaatatggtggtgatcctgtccggacatatgagacagccacttataactctaatttataccagggaagtttgtttgctgatgatttatgcgtcgctgctgatgatgtggctctcactggatttgatgatgaggattctcttcatgccgcaggattattcaatctaaatgatgaaacagttgaatatggatataaactttatgacaaattatatcctgcaagtacaacaaagcttatgacggcataccttgcttttaagtacggtaatatggatgacattgtaactgtttctgacagtgtttcaagctttgcctctgatgaagtagtctgcaacctgcagcctggtgatacagtgacactttatgatttattatgtggtcttttacttcgttcaggtaatgattgtggtgttgctatcgctgaacatatttccggaagtgtagaagcttttgctgagcttatgaactcagaagcgaaagctcttggtgccactggcagtcatttcgtgaatcctcacggacttcataatgaaaaccactatacaacagcatatgacctgtatctgatctttaatgcctgcattcaggatcagagatttatggacattatttccatggattcttatacaatgaatcttaccggagcagatggtacaacaagaacatttgatgtagtcccaaccaactattattcctcagggaagatcaatgcccctgaagggattcgtgtatttggcggtaagaccggtaccacagatgaagcagggtgctgtgtgatcctttatagcgaagatctggaaaagaatccttatatttccattattatgggggctgaagataagagttttctttaccaggagatgaaccggcttcttgaggctggaaaaacaactaaaacagaataaagaataaccgatacgaaaaagccatgtggcacagagcaacaaattagaagctttcatttttaatctgtccgcatggtttttttctatcttatttcatgtaatattctcctttaccgtttcctgttttcagtaacgctcttttgatttattaatatgtattcttcccatgaaaggctggaaatatacacaaaaaaatgatatactaacaaagttaaagcagaaatgacaggaggtaatatttttatcttggcaaagaaaaaaaacaagtctgtaaatataaaaagatataaggcaaaaaaagaatttaatattggaatgtttctgtttgcagttgtatttatttatcttattgttactattaccgcatatcttttagaagataagccttctatttatgaagtgcgggagggcagtattgtgaaggataatacctataccggattgatcatccgccaggaaacaactgtaaatgcagaatcgggcggctacattaattattatcagaatgggaacagcaaagtcaaatatggcgcacctgtttatgcaatttcaaagaatgctttgaattttgatgattcatctacagaatcatcttcaactgcagatcttagtcctgatgttcaatcaggacttgtgacacaacttcagacattcaatgaaaactatgacaattccaacttttcaagtatctataccttaaagaatgagctgcaaaatacattgcaaaatgcatactgcacaactaaaactgcgcagcttgcatctgtaattgagagcagcggacaaactgtcacaacctcttctgccggacaggacggaattgtttcccatacgattgatggtttagagtccttaactgttgacaattttacagcagataattttaataaaacaaattataaagtaactgagcttaccgatcagatgaagatatcaagcggttcaccggcttaccgcttgattaccagtgaaaactggtccgtagtgatacctttaaaagaagacaccgcaaaagaatttcagaaatctaatttacagaatgtgcaggtccgcatagataaagacagtgaaaagatgtggtccgctttctctgttcttgaacgagatgggaatttctatggtgttctgacctttgacaactctatgattcgttatgcatcagagcgttttctgaacatagaacttatcttagaagatgagtgtggcctgaagattccaaaatcttccgtagtagaagagcagttctttgtaattcctcatgattacattacaaacggaggtaacagctctttagaaggtgttatggttttggattcaaaaggaactgcctcatttcaggctgttgatatctatgacacctccgatgatggagaagtttatttaagtcgagatcagctgaaatccggaacagtgattgtaaaaccggattcttctgatacttatacgattgatacccaaaagccattaaagggcgtctacaatatcaataaaggatacgctattttcaaaaaagtatccattttatgtgaaagcgacgaatattacattgttcaggaaggagattcttacggactttctaattacgatcatatcgtacaaaacggagccggtgtttcctctgatgatgttgtatttcagtgatttgattttgtagtcctttggaaattggatacaaaattcaaaagaggataatcaaatttaaaaaaggagagataacttatgctagaaacacagttaaaagaagtagaagcaaagattcaggcagcctgtgaccgtgccggacgcaagcgggaagaagttacattgatcgccgtaagtaagacaaaaccgatagaaatgcttcaggaagcttacgatctcggtgtccgtgtgtttggtgagaataaagtgcaggaaatcacagccaaatacgatgcacttcctgatgatatccactggcacatgatcggacatctgcagaccaataaggtaaaatatattattgataaagtagatctgatccactctgtcgattctttcaagcttgcagagacaattgaaaaggaagctgcaaaacataatcttacagctaatattttaattgaagtaaatgttgctcaggaagaaagtaagtttggacttaaaacagaagaagttctcccgtttattgaaaagattgcaaatttcgaacatatcaaggtctgcggactgatgacaattgcaccttttgtcgataacccggaagaaaatcgtcaaattttcgcaaatttacataaattatctgttgacattaatgagaaaaacattgataatgtttatgtgaacatactttcaatgggaatgaccaatgattacgaggttgccatagaagagggagcaactatggttcgagttggaactggtatctttggtgcaaggaactataatatctgacttaatttattaacctgatgaatgagttactgtttacaatatttttgaacagtaattgaatagtatcattttttcgttggatcgtatgaataaaaaagagcgccacctgaaaaaggggacaagataggagtgtaaaaatgggtgtatttgataaatttcttgacatcatgaagttaaatgatgacgattatgatgacgatgaattttatgatgatgatgattttgcagatgacggtgattttgaggaaaaaccgcgtcgttctttcttcggtaagaagaataataaagaggaatctttcaatgactttgatgctgatgaagataagaagtttcagccttctgcttccagcaaggttacaccaatgcgtcctgctgcaaaacacggcggaaacatggaagtatgcgttgtaaaaccaacttctgtagatgattcccgtgagatcacagagacattacttgcaggccgtactgtaatccttaacttagaaggtatggatcttgagattgctcagagaattattgattttatttccggagcagcatttgcgatcagcggaaaccttcagaagatttccagctatatcttccttgttacacctacaaatgttgatatttccggtgatcttcaggatcttctcagtggatctatggaaacaccaagtgttcgtggaagatactagaatttaacttcaactataggaactggattttagaattattatgataaaagaaaatcagaaaaaagaaacaaagcttttggaacacagatttattgaactttccagaattgcttttgaacgtgaaattgttacatattcggattttcttaacctgaatgatcagaatatcctgcataccctgccaaagaacaagctttattcaagatatgttctctttggcgggtatgatatggcggagcgtcagatggctgcatttatccctgaggctctttctttgcgttatggggtatctgatattactccgaaagagattgattatccgttttgtgctgtgaaaatagaaccaaaaaataaaagattttccgaagacctgactcacagggattttcttggttccatattaaatcttgggattgaccgttcaaaaaccggagatattcttgtgacagaagattcagcacttctttttatcaataaggatcttgtatctgttgtaacagaagacttaacccgggttcgccacactgttatagatagttctgtcgtcaacttaaatatgataaactacacacctgatttccagcagataaaaggaactgtttcatctgttcgcttagacagtctacttccacttgcattttcttcttccagaagtaaactgtccggactcattgaaggcgcaaaggtctttgtaaacagcaaattgattacaagcaatggatatcaggtaaaagaaggagatcttatctctgtacgcggattaggtaagttccgttttgaggaagcggggaaaatcactaaaaagaatcggatcagtgtaactattcagaaatatgtataatctaaaaagcttagaaaagaggagcttatcgactcatgaataatacaaaaacaaagacaaagagttatcttttcgctgccattgggtttctgctcacattagcacttgaccaatggaccaaatatcttgcatctactatcttacgccgtctcgagtctttctctttgatttccggagtttttgaacttcgctatcttgagaaccgcggagctgcatttggtattatgcagaatcgacagattgtgtttgtagtcggaggtattattatacttgctgtcattttgtatctgtaccagaagatgccatttacaccacattacagaccactgcgtatctgtgctgtactgcttgcatccggagctgtgggaaatatgatcgatcgtgtgaaacttgattatgttgttgactttttctatttccgactgattgattttccaatctttaatgttgcagactgctatgttgtaattgcatgtattttatttgttgttctcattttattttattataaggacgacaacgattttgagtttttaaattttaagaacagataaaaacgcacaacaggaaggattctgaaagcttatggaagaacttcattttaatgcggatattacaggggaaaggatcgataaattccttgacgggagaatagagagcctttcccgttcttatatccagaaattaattaaagaaaaaaaaattcttgtaaatcaattaccggttaaagcgaattacaagttaacaacaggggatactatcattcttcagatccctgacccggaaccacttgatattcagcctgaaaatattcctctggatattctctatgaagatgatgacattctcgtcgttaacaagccaaaaggaatggttgtacatcctgcaccgggacattacagccatacgctggtcaatgcggttctatatcactgtggagaaaacctgtcgggaatcaatggtgtaatccgtccgggaatcgtccatcggattgacatgaatacaaccggttcccttctgatctgtaaaaacgataaagcccatcagattcttgcagaacaattaaaagaacattctatcacaagaaagtatcacgctatcgtacatggcaatctgaaggaggatacaggcactgtaaacgctccgatcggtcggcaccctacagatcgtaagaagatgagtacaaaagcaccaaatgggcgacatgcagtcactcattaccgtgtattggaaagatttggtaattttacctacattgagtgccagcttgaaaccggtcggacacatcagatccgtgttcatatgtccagtatcggacatccaattctgggcgatgagatttatggtcctgcaaaatgtccttataaactccagggacagactttgcatgcaaaaatccttggtatcactcatccatctacaggagaatacatagaatttgacgcacctttgccagactattttaaagatttattaaataaattaagaaagcaaaactaagtataggaaatagtataggaaatagtgaattgacattgtcttttttcatctttttggttataatatacataagatttcgcatagacttgaaaaggagtgtggcttattatgaagacaaatactattataacaatcggacgtcagtacggaagtggtggaaaagagatcggacatttcgttgccgaggcatttggaattaaattatacgacaaggaaatgcttgcgcgtgcagcaaaagaaagtggtatctgtgaggaattatttgagactcatgacgaaaagccaacgaacagttttctatattctcttgtgatggatacatattctatgggatatgccggcaacacatacacagagatgcctatcaatcacaaagtttttcttgcacagtttgatgcaattaaaaagattgcagatgagggaccatgtgtcctggtaggccgttgtgcagattatgcacttgaatcctatccaaatgttgtcagcatcttcattcgtgcagatatggaagatcgtattcgtcgtgtagcaacaagacttgatcttacggatgcgaaagcaaaagatctgatcaataagacggataaaaaaagagcaagctattacaattattatacaaacaagaagtggggcgaggcagccagctatgagctttgcttaaacagttctgaactcggagtacaaggtacagcgaaagcaattgaacagtatattcttttaaaagaaagtattgaaaaagaagccagaaatattgtttaatctcatttattaaaatgtatagtgcaaaggatacagaagagcagtagtgcattctttctgtatcctttttatctattcttattctttttacttcctatacttcacgaagctttacagcacctgccgcctgacggcgtcggtcttcatcgattgctgcataatgtttctttgttgtattgacatctttatgccccagaacatctgcgacaagataaatgtctccggtttctttataaagtgctgttccgtaagtgctgcgcagtttatgtggagttatcttcttattcggagtgacctccctggcgtacttctttaccatattttcaactgcctgaacgcccatccgttttcgctgggtagacaagaacagtgcgttttcatgaccggagagtggtatagtttgcttcctggtcgtgtaaagatacgtctttaatgcattctcaacctcttcaccaaaatacacaaccatctgattcccaccttttcgtgttacagtaattccgttattcttaaaatcaatatcctgaagatccagtccaacacattctgatacacggattcctgttccaagcagaagcgttagaattgccagatctcgattttttgtcttttcaaaatatgctttccgctgacctgtaagattatcccctccatgatcaacataatccaggagcattgcgatttcatccgtatcaagccgtataatcgctttctcatgcagcttaggcatctctacaagcaacgtagggttcttgctgataatttgccgtttaaaataatatccataaaagctacgaagcgcagacatctttcttgcaagtcccttttctgtgttcgtgatacatttttcttcgtcattcttatagaccttcagatattcctggtattcctcaatatctacaggctccaggcgttccaaatcatgtacctcaaattgttcgatcgtataatttttataaaccggattattctccataaggaaatgaaagaaaacacggatatcataggcataagaaatcctggtccgcgcagatgtcgttggttccaccgcacgaaaataatcctttgcaaatggaggcaatgtcttcaggatctctctgagacgtaatgtgttatctatatatgtctgttcatgatatgtttttctgttagaagtttctgccatattaaaagctcctttatagattcaaatttactgaaaaccccatattttttatatattttaacataagtactgtttttcgtctatatcttttggaaaaatcggtatttgtcgtatagatttatttctgttaataaaatccgaagagactatctgctgctatttaaagcgctatttctggaaagcagatagcaatcttcttcggattcagggagtgtatatatcaatacatagggtgtatattgataccatttataatttttcgtaagcgatcatcaggtattgacctgcatgaatcgtatctgaatcaagatgattcattaccttaagtgcttctacatattcgcttacggagccatatccgtctgtaattgtttcttctgcaatgctccaaagactgtcacctggttcaattaatctacttgtgtaacagatctcaatagcatctgaagttctctgttgatctatttcctttgccgaaactcggaacattccaaagtacatacagctgcagagaataaaaagaatactgcatattaccaaaccagaatgacgaataacaccatgtttcttctttgaatttactgaatgatttcctgaatactttttcataatccttttcctctcttttcgcttactgtatacctatcttctgttattgctatgcatcgaacatctgttcttttatgttttcattatatcgttcgaacaaatgtttgtcaagcattttacttcataaaaccgaacatattttcgcaacaaatgtttgctttctaaaaaatgctgtgttattatgttcttatgattatagtagattcggagggaacaatatgtcagaagggaatattactcctaagcaaaaagagattttagaatatataaaagaccagattttaacaagaggctttccgccggcagttcgtgagatctgtgaggctgtgaatttaaagtctacctcttccgttcattcgcatctggagacgctggaaaagaatggttacataagaagagaccctaccaagcctcgtgcaattgagattctggatgataatttcaacctgacaagaagagagatggtgaatattccgatcataggccgtgtcgctgccggcgaaccgcttcttgcagaacagaatattgaggattattttcctattcctgtagaatatatgccgaacaagcagacatttatgcttcaggtacaaggtgaaagtatgatcaatgcaggaattctgagtggggattatgttattgttgagcagactccatctgctgaaaatggggaacaggtagttgcactgattgaagatggcgctacagtcaagactttctatcgtgaagaaggtattatccgcctgcagccggaaaatgatgcatatgatccgatcattcttacagatgtcactatcctgggtaaggtgatcggtgttatccgtatgtattaaatctcattactggatataagatttttaattagaactcaaagtataaaaaactggcagaatgtagtactccgctactcttctgccagttttttatacttctcactatttatgcttcaagatcttcaacagacacatgatgtccatctttccagattctctccaaattgtagaactgtctgttctcacgatcaaagacgtgtacaataatatcaccaaaatcaagtaacacccatcttccggatgcatttccttctctctgtaccagagaatatcctgctttatgcaattcttcctccacattgtccacaagggcattcacctgactgtcactgtttccatttacgatcaggaaataatctgcaagtacagacacgcctgagatatcgatgatctggatatcttctccttttttatcactgagggctacatatgccagctttgccatttcttttgactgattcatcttttattctcctttgtcgctataatattgataagtttcaatgctcatcggatctaccggcttaccattcttacgcagataattaaccgtattccctgcacaaagacagattgcatggtcaatatcgacaaacacagtttcacggatctcctgaagaccaggaattatctttctgttcggttcaatataatcagcaatataaataatcttctcaagcattgtcatctccggtcgtcctgttgtatgccatgtaattgcacttaaaacgcctttattggtcacaccatactctttctccgcgaaatatgctcccagtttcgcatggaccaatgccggcatctcaagttctgattgtgtaagcagaataccgtgcttttgacatctctcaacctgttcctgcgcagaaccatactttccacaatcatgcagaagtcctgccatcatagcatcatcgatatcttcatgataacgcattgcaagagatgctgctgtatacataactccaattgtatgttcaaaacgatcttttttcagctttttttccagttgttttctaatgtcaatgaaagcttctttcataatcgtgttctgtctcctctctggttactgttcactccacaccaccattttgacaagtgcagataaaatatgctttaaatatatagattcttttctttgatataatctgcgacaacatcaggcaccatataacgcacgctgagtccctttgctgccctttctcttattgtagtagaggaaatctctaccaacggtgcgcgaagcagttctatatgcgctccgtatgcttccgtgagatatcgtatctgtcccttcattgctgaagcatctttgtcgtcacgcattgctgcaagaatcgtacaggtcgtaaaaatttctctgaaatctttccactcttcaaaagcaaacagagaatccgctccgagaataaaataaaattcatcgtttgggtagatctcgttaaaatgcctcattgtatgatacgtataagagtgcttcttcgtatccgcttctgaaagattcaatgagaaattcggattactttttattgcaagacgaaccatctcgatcctgtgatgcattgcttcttctgtatcgagtgtctctttgtgtggaggatttccattcggtaaaaaccagatctcatcaagtccaaaatcttcataagcaaactcaccaagaagaagatgaccgatatgaatcggctcaaatgtaccacccataataccaatcttcattgtctgtacctgttccttttctactatggaaaacacgctctgcgagtttcctatattcaaattcagcttccgaatcatataataactcagaagctgaaaaaataattattttggaagctgaattttctttttatcgtcttttccttctttgtaaaggacgattttctttccgattacctgaacaacctgagactgtgttctctctgcaagtgtctctgcgatttctctcggatcatccatgcagttctttaaaacactgatcttgatcagctcacgtgcttccagtgcctcggcaattgcctccgtaagccccggattcatgcttgcctttccaacctggaaaatcggatccattgtcatcgcaagtccttttaaataggctctctgttttgtagtcataatattctccttatttataataatcaaactgaagtccgtacattctaactgtgtcaccttcctggatgccagctctctcaagatctgcaagaatacctgaatctttcaggaacttctggaagaatgcaaatcccttctctgaatcaagattcgtatatccaagcattttctcaatcttcggaccttcaactacatacattccatctgcctgttctaccgtataaggaagatcttcatagatcagttcatcatccgggaagtattcctgctcgaatactaccggtttctgatccagcttctgaagctcgttacttacatagtagagaagatcagagattccttttcctgtagctccggagataggaaatactttgattccctttggctcaaactcatctttcaagcgctgaaccggatcatcttccggatcatagatcagatccgtcttgtttgctgcgattacctgcggacgttccgcaatttccggattgtaagcagcaagctctgcattgatcttatgaatatcatcaaccggatcacgtccttctgttccggctgcatcaacaacatggatcattaactttgttctctcgatatggcgaaggaactcatgtccaagaccaacaccttcggatgcaccctcgattagtcccgggatatcagccataacgaatccctttgctccatccagatcaacaacaccgagattcggattcaatgttgtgaaatgatagtttgcaattttcggttccgcatttgtaacacgggaaagcaatgtagatttaccaacgttcggaaaaccgatcagacctacatctgcgatcaccttcaattccagattcacttccagctctcttgccggctgtcctggctgtgcatacttcggaacctgcatggtagaagtagcaaaatgctgatttccaagcccgcctcggccaccttttaagacaacctgacgtctgttctctccggacatatcagcgataacttttcctgtaacagattctttaattactgtaccttccggcacacgaagaacaaggtcttttccgtccttaccgtgacagcggcgctttccgccctgttccccatcttcggcagcaaattttctcttatgtctgtagtcaacaagagtattcagcccttcatctacttcgaagatcaggtctccgccgtgtccaccgtctccaccgtccggtccgccgtttggtacatacagttctctgcggaagctgcagtgaccgtctccgcctttaccggaacggatcaatatcttagctctgtctgcaaacatattattctcctcttaatttgtatcaacaactgtttctgtatctttattcacatcatatatgcgtaaatttcttcatcatctgacaataaaagatttctttgaaagaaaaagcctcagaccttaaaaaacgtctgaggcttccttttgccatgtatgcgagtgaaaagattccgtcggaactttccagccaaaactgattactcagctactggatagatagaaacctgtttcttatctcttccttttctttcaaatcttactacaccgtctacaagtgcaaacagagtgtcatctccaccgcgtcctacgttaagtcctggatggatctttgttccacgctgtctgtaaagaatgttaccagcttttacaaactgtccgtctgctcttttagcgcccagtctctttgcctcggagtcacgaccgttctttgtagaaccaactccttttttatgagcgaaaaactgaagattcattttcatcatggtaattacacctccttgaaaattatgtcgatatatttctcgtagtcattgctgtcttctatctcttccagaccaagaatcatggaatccagcaataatgtggcatcatgtgatggtgttccgtcaaaacggaactcaatacttccggtatcttcatccgaaacgcagcttgtctcatcatctgtaaaacgctcaattgaattcagcgcattgatcacgagagcggatactccggcacagacaatgtcttcaccggcttctgcatatcccgcatgaccctccatatcaaacccaacatattcctgccgttcggtcttataaatggttaccttaatcatcagaaacagattaagcgttgatcttttcgatctttacttctgtgtactgctgtctgtgaccgtttttcttatggtatccagattttctcttatacttgtaaacgataactttcttagctttaccgtcaccgattacagaagctgtaactgttgcaccttcaactgtcgggttaccaacaaccatcttgtcgttgttaactgcaagtacctggtcaaatgtataagtctcaccagcttctaccccaagtttctctactctaatgatatcgccttcagctactttgtactgtttaccacctgttgctataatcgcgtacatatggcacctcctattatcattactcgccaactatggtgtctgaaatcagaacttaaatacctcgttgtgcggcatactcatatatattaacttgcaaatttagatttgtcaatagggttcatctaatttttttattttttcataacagtattcaataatactttttcttgttatgattccaatgaatttcttctggtcatccacaaccggaacaaaattctgattcatcgctttctgaagaagatcctccatgtcagcatctgccgatacagcctcataatctgcttttcgtgggaagtcctggataaaaattgtctctgcctctttcaggttcagattcgtatacttcttgattccccaaaggatatctccttctgtcattgttccgacatattcccctgccttattcagcattggaatagatgcatatttatgaaattccattgtttccaaaacctgacgtaatgtgctgtaatcataaataaaagcaacctcactcttcggtttcagaaaaaataagatattcatctcttttcagcctttcttggttttaaatctgtgtcagtacgaaaatctcatacaatgctttgatcgcatttttaaaatcatcatgacgtacaccaacgatgatattaagctcactggatccctggtcaatcatcttgacattaatgtgtgcgtgagcaagtgcagagaagattcttcctgctgttcctcttgtagacttcattccacgacctacgatcgcgatcagtgcaagatcagactcaagctcaatgtgatccggatctaccgctttgtgaattcctgcaagaatctgctgttctttctcttcaaacttatctttgtggacaaagattgtcattgtatcgattccagatggcatgtgctcaatagaaacaccattgtcttcaaatacctgaagtactttacgacagaaaccaacttctgagttcatcatcgctttttcaattgtgatcgcagcgaatccatctgttccggcgattcctgtaattgtgtacttcggctgatagcatgttgcttctacgataagtgttcctttgtctgccggtgcatttgtattacggatattgatcgggattcctgctcttcttaccgggaagatcgcatcttcatgaaggacacttgcgcccatataagaaagctcacgaagctctttatatgtaattgtctcaattgattttgatccttttacaattcttggatctgcaatcaggaatcctgatacatccgtccagttctcataaagatctgcattgactgcacgagctacaagagaacctgtgatatcagaaccacctcttgaaaatgtaactacacgtccttcctctgttgctccgtagaatcccgggataacagcattcttagccttttcaagtcgtgcagacataatttcatttgtgatctcggactggaaatctccattctcatcaaaacgaacaacctctgttgcatcaataaattcaaatccaagatatgcagccataatcttaccattcaggaattctcctctggatgctgcataattgcttcctgctttttcagaaaagttcttgcggatcacttcaaaatcctcatctagggagaactttaaaccaagtccatcaataatttcctgatatctatctttaattgctgcaagcttctctgtgaaatcttcaccattctcagcagccgcatagcagccatagagcatatctgttacctttgtatcagctgaaaaacgctttcccggagcagatggtacaacatatcttctggattcttctgcacggataatatttccaacttttttaaactgttctgcgctcgcaagagaacttccgccgaactttactactttcttcattcttgctattcctccaatgtaattctgcgttgctgtttcgagtttcccgtgaacagtaacaatactgctttctgcattatcggttcattattatacagtgttccacagttcttgtaaacttttaaataagaaaacttataggaatttcttataagcattaataataatccattaaaacgtgatctctccatattccgcccgtgcagcctttttcagatcatccggtttcaatttgatctgcattccaatcttcccgccacttacataaatgtattcctgatgctgtgcactggaatcgatcacagtcggaaattgcttcttcattccgattgccgtacagccaccacgcacataaccggtcaccgcagtaatatccttcacatggagcatttctactgatttttccccgactgacttcgcagcctttttcagatcaagctccgccgcaattggaataacaaacacataatgcccgcctgtttttccaaccgtcacaagcgtcttatatacctgttcatgcggaagaccgattttatctgctgttgtgattccatcgacaaattcatcacactcataggtttcatattcatatgggatcttgttcctatccaagattctcattgcattcgttttcagttctttcttactcattatattagcatctcctctgttgtctctgcctgcaaatgcatctgctattctatctctcttactgcttcatgcagcggcttacgcactttctttctcgtcacctcagcaagtccaagtgctgtaatatcaactaatgttgtctggatcggatctttcgcaagaaaatatcggaattcttttaataaagtttcctcattcttttcctcatcctgatttataaaatcaatcagaatgattccagacagattacgaagacgtatctgtctggctgtttccttcgctgcctccagattcatcttcaatgtagactcatcatcaccctttttacggacgtttttcccggaatttacgtctatcacggtaagcgcctctgttacctggatcaccagatatcctccatgtttcagccagactctttctgctaaggcatgttcaaccgctgtttctgtactataaatctttccaagtggataaccactgtcatcatggaaatgaaccagttccagattctccggcatttctttcttgaaatagctgcaaatcttttcatatatttctgcatcattcacaagaatttcttccatgccatccatatagacatttttcagatctgtaatataggacggtggagcagatttcaggcatgagaaacacactctggaagcagcatattttaaaagatgttcatattccgctttcagctgttcaatctctgtaaggacatcttcgaatgcagcatcttttgcattcgttctgataataagaccatactggtcattctgatattcctgaagacgctccttataggcttccctgtctttttttgaaattttagaagatacacctattcttgtattaccatgcgtcaaaacggcatatctgccagtcagactgatattaccggtcactgtcggaacctttgtctttacagcttccctgctgatctgaactaccagttcatcaccgatgcaaagtggcttcttcccaatcttatgcgtaaaaaatgcattctgtgcatctcttaaatcaaaataacaattaacgccaggttcgatctcaagaaaagctgcccctatattctgtacgatattctgcactttggcgacatatatatcgccaatctgatgcaccttttcctgttcgtcggactttgcacagtgaatctcagcaatctgatcctcttccagaaaaaaggtccacacatgattttcttttttctctatcaaaacttttcgtttcatctgtttcttctcattcctcatcgcctgtcatatcaacacccattgcctctaatggaatcaaggatccatcttcactgcgatctgtatacatttccagtctgtgatgctggaatttcacgctgtccggttcaattccaaggaactgacaaaatgcttccatcacaagatccggtttcagattctctacacttcctgctgccactttcaggtaaacagaatcgcctcgcagttcccatgcatagatcaatggtttaatgtcaacttccttctcgcttcgttttgtctgctttacgattcggatctctggctgttccataaattctgaaaatcgttctttccagccctccggaaatgctccctttctcacagatgtcagataatctgctcctgcaaggattgtcattccggtcatcttcttctcctcagcaattctacggatgcttacgatctcgattccctcaatctgacaggcttcgttcatccttctgactgcatctgcactgttgactgcttctgttaattcaatatcaaaatattctccgtcacttgtcagtccgattccaagcgggttagcaaatgacatgatcatatgcggactatatcctcctgaaaatgcaatcggaatatccgcgcgacgcatcactttctggaagaaacgcatcacatcaagatgtccgatgaatcggagagaaccatattttctaaatttaattcttgccttcataacagacacctcctccaaatttcgctgcgccacatccggaacactgcatacggcagttcggagttactttttcttccatcgcacgatcccattctctgcgcaggaactttcttgtcacaccgatatcgatgaaatcccacgggaacaattcatcttctccacgctcacgcagattgtaaaaatcaatatcaacacccgtgttctcaaatgcctgcatccaaagttcattgtggaaactctctgtccaggaatcgaacaaacatcccagacgatatgcctcctcgatcgccttgctgatcttacggtcacctctggccataataccttccaaaaccgtaacttccgcatcatgccagttatatttcagactcttacggtttaactgttctttaaattcatcattcactagatgtgcacgtctcatatattcttctgctttacacatcggagcccactggaacggtgtgaacggcttcggtacaaagaaagaagaacttgccgtgatctgacattttccatgtctctggtcttttggaatctcataatatctgcgggcaaccttttccgcaaggtgagcaatctctttcatatcctcctcagtctctgtcggaagtccaagcataaagtaaagttttaccttcgtccagccaccttcgaaagcctcgcctgctccatttaagattacgtcttctgtcagtcctttattgatcacgtcacgcattctctgtgatccggcttccggtgcaaatgtcagactgctcttgcggatatcctgaaccttactcattacatcaagagagaaggcatcgattcgaagagacggaagagaaatattaattcccttattcttaaactcatcgatcagatatgttaccagttctttcaattcagaataatcactggaacttaatgaactaagagaaatctcctcatgaccggtattctgcagcatatcatgcgcatactgtttcaatcgctcaacatttctttctctgaccggacggtaaagcattcctgcctggcagaaacgacacccacggatacatcctctctggatctcaagaacaactctgtcctgcgttactttgataaaaggaacaaccggtttcatcggatacggtgcatctgttacatccataacaatctgcttcttaactacagccgatgcatattcattattcggtgtaaatgatttcaaagtgccgtcttcattatattctgcatcataaaaaatcggaacatacagaccctcgatctgcgctgcacgttctaagaactcccggcggctctttcctgaacctttccattccttataagcgtcaagcagctcatcataagccgtctcaccttctccgatataaaagatatcaaagaactctgcgatcggctccggattgtatgtgcacgggccaccgccaatcacaaatggatcatctaaagttctgtcctttgcatgcagtggaatctgactcagatcaaggatctgcagaatgttcgtataacacatctcaaactgaattgtgattccgaggaaatcaaagtccttgatcggatcctgggactccagtgcaaaaagcggaatcttctgttctctcatcactttatccagatcatgccatggagagtaaactctctcacaccacacatcctctctgcggttaaacatatcataaagaatctgaatccccaaatgagacataccgatctcatagacatccgggaaacacatcgcaaagcgcacatcgatgtcttccacgttcttcatcaccgcattcacctctccgccgatgtaacgggcaggtttctcaatttctaataaaatatcatcatctaatgctagttttctcatggatttctccttgtattttgtacttatgcatttatattacaaaattgtaaatgctacttttaacatcatatcttttgacgataaaaaaagcaacctattttctctttttatgtaattgttaacttgctaagcttgttacagtcatatctttcagacatgtactccggtagtcactcggtgatattttatatctttctttaaatactcggttaaatgttctctgactttcaaatccactatccagacaaatgtttgtaatagaatcactcgtattttccaaacgatggcatgcatagttcagccttacatcgttaagatattgattaaagtttctatggaatgtcttggaaaagagtctggataaaacatatttgctcacgcccaggtcttttgccatctcttccaacgaaaacttcttcttaaaatttgctgatatataggaaactgtctggtaaataagatcgttgctccccacactgctcttttctgccaaatttaattttcctatgcagcgtgccaacacaatttgaagatatgcctgtgcaacagtaatatccgactgttctgtctctaaaattgcatttataaccctatatacctccggttcaaccttttccgctttgatgattgggtattcaggagccatggattgcatgatatctgcaaatttggctatcgtaaatggcgatgcaatcagataagtcgctttatttacactgggtgtcagtacctgatagtgatgaataacatctggaaatacaaagcctatatctcctttttccatatggtatagttcctgtccgacaccaagttctaatgctccacttgttacacaaacgatctccagtgcattatgaagatgtggttcaatatgttttgacttcctatttattgctatgatctcctcttttgtgtcaacatattttaactgcatgaaacactcccctttgcaacatttgtctttttcaaaatacagttcaatcactttatatatagaaaaaagcactgtctcatcgagcaatgactagacaatgctttctcctgttaattctaatttatgtctgatgcatctgttacttcatctgtaacaattcctttttctgctttcagttttttatttgcatcttctacattcattcttgaaagtacaaacataatcaatacatcaaagattaacggaagccaaagatacataaactgcatcatatcaagtgcagactgcggctgagttgcatttgttccgatatatccactgaactcaagcagccatccaacaacagcggttccaatacctccaccgatttttacgccaagagaagtacaagagtacatcgttccgtcaattctctttccctgtgtaagataagtgtactcagagcaggatgcgataactgcattcatatctccctgccatggtccctgacctaaggctgcaagagctgtaaatgccatcatcagcggaacactgcccatatatcctgcaacaacaacaagtgctctaccgatgactgctaagacataacctcttaagttcagtttatacatacctttccacttaccaactaatgtcggtgtgaaaatcagggcaatgatcagtggaatatttactgcccatgcaaattgtccaaacaaattcttatttttcagtacccatgtcatgtaataaatgccagctccaatcatggcaccatataactgctgtaaaatatatgttccacaaatcatcatgtaatatttgtttttaacaagaagcttgaatgcctgtaccattccgtacttttcattatcatcctttacttctccttcgttaagttcttcctcaggaagttccttaacagaaagtgctgaaatcgtatttacgacaagaccaatgattgcatagataatagcaaccgttctccatgctgcagcatctccaccacatttatctacaaatccaactgtaattgcctgaatcagaagacttgttgaaaacgcaaaaataaaacggtaagatcccatctgcacacgctctttgctgttctttgtaatcagtgacgtaagtgctgaataagcaatattgtttgctgtataaaacacaccatttaacagtgtgtaagagataaagaaccatgcatatttagccgttgttcccaagctgactggtactgcaaaacagcagatcagcgtaatggcacaaccaatatatccatatagcatccagggtttcgcttttcccattttactgtgtgttttgtcaatcattgatccaaaaaatatatccgtaaaaccatcaaatagttttgatacggcaatcagggtacctacgacacctgcagcaagtcctactgagtccgtcaaatagaccatcataaaagaggtcaggaacgcatagactacattacctgcaatatcgcctgatccatatccaattttgttataccatttcaaatactttttttcttccatcgaatttctttgctcctcatcttcatcgcacttagaatttcaagatgtctaacagagtatgatgtctaattctagttttttctctgtttttgtctggttgctctgtatatccggactttacataacaatcagactctctttccttgtttacgggttacatgaaactttattatccctttatatacggtatcagtgtaaactggaaccggaataatacatcatcaaatcggtactgctccaatacaactggaccacaactgttagaaccaatgccatttagtgcatagtcaacacaaaatactacactatctgattctgtcagttcataattatgcgttttctcctcaagttcttcctgcgtataataagaagcattgaatgagaaggcattttccgcagagaccacaattccatatcgactgttgttaagctctacatattcacaatcataatggcttccattttcctgtgggcgaatataatcctcatgcaaatcatctacatttgcctgatacaaaccgtggctcgcagcctgatgtttgtcacaatagctttcctgtggtcccattccaaagtatcttacagctgaaagttttttatccaggaacatcctcacaccaaatcttggcaggtccggaaattcatcatcttttgttactgcaatatctgcatcaatctttccagcagcttctattttccatgtaatcgtcacatcaagtatcttctgtactgtctctgccacaacggatgcatggcttgtaatcttcacaccatgttttccctgcacaacctctgtcgtataggctcttgtgtaagccttatcatagtgggctttcttccattcagacttgatgtacatatcgttatctgttggagctctccaaatatttaattccatcggatggttcaagtattcccgccctgcgaatttcatctctgtaaagagtgcagtacgtttgtctatggtataagcaaattcacgccccttgatatgaatctgtgtatcattttcatttacctgtaattcagaatccactactgtttttggtatccatttctctgcaagtttacattttgtatcctctttacttacctcaatttcatcaaatccaagaatatggtcttcatccaacagtggcaattcttttttcagatggtaaataagttttaaataacatttcccattctctggaacattgatcttcaggtttgtttttccttccccgtgtggtgccacagaaaactccggaagtatgcctttgctgatcacaagaccatcctgtgtcagctcataactaatcttcacataatctttcaagtcatcaaaatccatgtagttatgaagcaccagttctccgctttctttgttataggaaataactcttgccgggcgataaacattcttgtattccaaaagtcctgtatgtaccgttctgtccggatatactaatccatccatacaaaagttgccatcatgaatttcttcgccatggtcgcccccataagcatatatagtctttccattctcagcagttccatgagcaatcgcatggtcacaccattcccagacaaagccgccgcacattttatcattatcctgaatcatctggaagtaatcttcaaaatctccaggtccgtttcccatgctgtgacagtactctaccaaaaggaagggtttgcttccatctttatccagatattcctgaatttcggaaagcgctgggtacatccgactgtacacatccagattgctgtaatcatatgtttcatcataattacgatatcttgcactctcatattgtgtgatacggtctggatcaaaattctttgtccattccagtgctttttcaaagttgcaaccataagcactctcatttcccattgaccacataacaatacagaaacggtttttgtcacgttccaccatgagttttactcgatcaacgattgcctcttcccataccggatcatctgcaatcttctcattccatcgtttgaaccgattgtaatcggtgtcttcttttctgtagatcataaatggaccatgagcttcaatatctgcttcatctattaccatgaatccatacttgtcacacatttcatagaaaaatggtgcgttcggatagtggctggaacggatcgcattaaaattatgctgcttcattaacgtaagatcggttgtaatctgttccgaattgattgtaaatccagtaaccggatcagaatcatgtcgattgacaccacggaatttaatcttctgtccatttaaataaataacctggtctttaatctctatctttcttaatgcaatgtgatctacaattacttcattctctgtttcaagaatcagtttatatagatatggattttctgtattccaaagttccggacttgcgatttctaatacagctgttccttcttcagcaatacttcctagtgctacaactgctccgtttctatcttcaatcgaaatttttacatttaacggagagtagaatttcatttcaatttctactttcgcaagcatatcctcaattcttgttttaatatgataatcactgattgcctgttttgggcgtttcaaaatgtacacatcccggaaaataccactcatacggaatttgtcctgatcttccaaataggaaccatcacaccacttcatgaccagaaccgctatgctgttctctccgtcccgaaggaggtcagtgatatcaaactcactggtcatatgagaaacctggctataccctacataagagccattgatccatacataaaagcaactgtctactccttcaaaattcaagaaagcttttggtgcattttcatctttgtgataaacaaaggtatgtgcatatgttccacatggaatatcctgtggtacatacggtggatcaaatgggaacggatacctgatgtttgtatactgatgtgtgtcatatcctgccatctgccatacactcggaacctgaatctcatcaaaattttctgtatcataatctttctcaaagaagggttcctgaacatcatagatactgttaaaatactggaacttccaagttccgttcaataactgcattcggtctgactcttccctgtgctccaccaggttatccattctttttgatgccggaataaaataggctctggctggcattgtattttcatgcagtacgcttaaatcctcataataacgtggtacaatcataaataactctcctttaatacatatacatttttttgcactttgtttttccacagcaaaccttgtcttttacttttatgtttacgcttctctgttttgctatatatatcttatcctaatctgcaaaacatgtctatgaattggattagacaaaatatgcactaaatgatacaatatcaaaaaaaggaaaagaggtgctaccatatgtatatgaataccggttatttaaaccactcccatatggatttcaaagacaaaagtcgcccactggttgtaggaagttgcggtacttaccgcctttccagccatccaaagttaccaacctaccgtccaaggggacgcctggattatcagattatctatatcactgctggttgtgggcattttcattttgacaatatggataacgaaacgattgtccccgccggtaatattgtactgtacagaccgaaggaacttcagaaatatgaatattatggaaaagataagacagaagtatactggattcattttacaggcaacaatgtaaaaaatatcctacggcaatatggattcccggataaagagcgtgtatttcaggtcggaacctctgtggaatacgaacagattttcaagcgtattatcatcgagcttcagcgttgccaagataattatgaggaaatgcttgtccttctgctccgtcatcttcttatcatctttcatcgggaactgaccagggaacatatctcaaaaaatgaatacctggatcacgagatggataacgcagttacctttttcagtgaaaattataaccagaatattagcatagatgattatgctgcctcacgtggaatgagtgtcagctggtttatccgaaacttcaaaaaatacacaggttctacaccaatgcagtttattgtgggaatccgaattaacaatgcccagatgttacttgaaacaacaacctattccatcaatgaaatttctaaaatcgtcgggtatgataatcagctttatttcagccggcttttccataagctgaaaggatattccccaagagagtaccgaaagataagaaacaagttctaaaatccacaatatcataaatccctaactggctgttaatagttacgattgatctatattatgatcaggcaatgcctgttgtaatgattaaatcgggctttccccgatgtggtgtgcttcaaccacctcctttcaaggcgcaaaaaagcaccttaaccttattggctaaagtgcttgtatttgtttgctattaaattgttgtgagtcagacaaacttgaatttggaacgtgctttataaattttttccgatcccctcaagttcgttcatggaatccttgtttttttcaagttcatctctggctgttgcgtaatatgattttttgaaaagcatatcccatgaaagatattttgccatacagtcaaactgcttatcaatcaactcatactggatactgtctacgggagaaccgcctacaacaatcgtgccaacttttttattttttaactgcaatccacggcagtagcacttatcaatgataagtttcaattgtgctgacattccccaccaataaactggtgtagcaaaaagaatcatatctgcggcagcaattttatcaattgtaggatttgtatcatccttatcgacgcatcccttagagcattgacagacatcacatcccttgcatggtgcaatgttgagtttgtcaggttcaatgatttcaatttcattcttttctgatgctccttttataaatgcattgattgctgtcaacgtgtttccttttctggcacttccattaatgattacaattttcatgcgtgtatcctccaacttccgatttgtaaaacacattcttttttacataggcacagtataccacatttcctgtgcctatgctatatcatttaatgcttcttccgatatgaactcatcctctccacagaaacctccggatagaagtaagtaagaatcgttgctttcggaactcctgcagccaatgctttcttcacttcctctttctgctctacttcatcctgcatggagaatcttctgcttaattccgcatcaccaagcaccataaactgctcataggtaagagaatctatatacacattctcgcccttatccttcagtttttcataatacttttacaaactccactgcgttttttatatcttcttcatttggatgccctttggcaataccacccaccagtttaaatggaccaaatgtgtcatagcccttgcatccgaattttcctatcactttagaacgcttcttgtccaaaatctgctctatggatttgtaattcgcacttccaccataagtacagatcagaaatacctttttatcgtccggtagattcttctctgcaaattccaatatcgactgatgaaattttgaaaaatagattcctgatgcaaacccaatcatatcataactactcagatctgcatctggttgttttacagcatcaatcaaatcaacttggcactcttctgctatgttttttactaatttttctgtatttccatgatgtacagatgcatatacgattgcttttctcatttattttcctttctgcctgctccatcaccacaaatcgtattgtttcatagtttctgcatttcgatattcatgtttctcataatatcctatcaactttccctcatctctgagtgccaccatataaacatctttattctgtttctcattgtgaaaagtataaacgatattatggctttcatctactgcaaaccagtccactacctgctgtattctatcccttgattccggattatgacaatctaacagacttcttccaataagtttatcaccgcctcgcttcgcatagctgataactgctgccggattcatgtaaataatctcatgtttaagattgcatataacaacggatgccctgtcctgatcaacaatactcttataaaaactgaccgcatctatctttttatatatttttttcttcttacttttctccattttatgttgtccttaaaacttcactacttccgattcatgtgtaaatgatgaaaatgtagctgtcacattttttaaatagaatacttctgtatttccatcatctgctgagtacatattctgtaaagatggataagcatcaagcatagactgtcttgcttctcttctgtcatcttctacaagttctccggctacacgaagccactcgccattttttaatgcacagatttctacctttgggtttgcgtgaatctgttttgaaacatccttcacctttccggtctgaatatacagttttccttcaaaaacatgcgctgttccaaaaggtctaactcttggctggtctccttccactgttgccaaataatatatttctgcttcttttaaaaaatttactactcgttccattgtataaacctcctgctattaaaatctatcaataatagaattataccattccatcgcttcttatgcactaatcaaccgtatcataaaacccctgtttcacatcattccagacgtaaaccaggggtttcacttatatcattctataccatagacagtacatatactatctattcacttttactctgtctcataaaagactttcttatccagagctttattctgatgtgcaacgattgttgtacatacagcatcacctgtgatattaacagctgttcttgtcatatcaaggatacggtcaatacccatgatcagaccgattgcctcaaccggaagtccgacagagttaaataccattgtcagtgtaaccagaccaacacttggtactccggctgttccgacagatgccagtgttgctgttccgataacggtaatatagtctgccatgctcaaatggattccaaatgcctgtgctgcgaacacaactgcaacaccctgcatgatggaagtaccatccatgttgattgttgctccaagcggaatcgtaaaggaagaaatcttcttggaaactccgactttcttagaaagtgtttcaatagaaagcgggattgtcgcatttgatgtcgctgtagagaatgcaaatgccataaccgggaagaatttcttgatgaagcggatcgggttcagtcctgtgaaaatctttaacagaatctgatatactcccagacactgaatcgcaagtgccaaaagtactgcgatcatgtattttgccagcggaacaaatgcactgaatccgattgtagcaaaagtacggctgatcaggcagaatacaccgattggtgcaaggctcatgatcatcattgtcatttccatcataatgtcattgaactggctgaagaagttcgcaactgtctctgcacgttcacccatcttcgcaaggataacaccaatgatcagcgcaaatacgataacctgaagcattgttccacttgccagggaattgatcgggttatccggaatgatatttaggattgtatctgtcagggaagttgcttccattgtctcaactgtagacgcacttgtcttgattgcactcatatcaagtccgatacccggattgatcagattaccaactgataaagcaactgttacagcaagagctgttgttgcgaggtagaataccaatgttctgacacctactgttccgagcttcttcgtatctccgattgccatacttccgcacacaagggaacaaaatacaagcggtacaacaagcatcttcatcagacggatgaatccctgtccgatcacatagaggattccttctacaataatatcattttttaccttgctgtctggaatcaaataacaaagtacaattccaaaaacagcacctaaaagcagagcaatgaaaatcttggtcgtcagaccaattttcttctctttcttttcatctttcacattcttatttttcattctaattctccgttctttctttcatatactcttctaatgactctttccaatccggcatatcatacatatcaataatacggagaatgaagttgtccaataccgcatacggtggtctgacagaagaaaggtctgactgttctgtcggaactgcctttaattcaacgtttttccctgacaatctcaagatctcctgagcaaattcgtaacgattgcagactccactgcaagttacatgataagtaccatattcattcgtactgatcagatacaggatcattcttgcgagatctttggcacttgtcggggaaccaaactgatctcctgctacagaaagtgtttttccctgttctgccacttcgagcacacggttaacaaagttatttccaccttttccgtaaacccagttactgcggataatgaaatgcttgtgtgtgaattctttcacataattctcaccagctcttttggatgctccataaacagtcagtggattcgtatcatcaaattctgtatacggtttcttgctctgtccgtcaaatacatcatctgttgaaagctggacgatctttgcgccattctttcttgcgacgatacttaagtttcttgctccaagtgcatttacccggtaagcatgttccggttctttttcgcacagatcggtgtctgtaacaccgcagcagttgataatcacatccggacggttcacaataccgaagttaagaacttcctctgtgtttgtaatatccagatcatccagatccgtattcagcacttcgatctctaatggatccagaatgtcgttcagcgcccggccgatctggccgtttgagccggctatccatactttaatcatctctcatttcctccttctcatgcaatgaaaaaggcgctgaatccaatcaacgcctctcatatactataaaataaacgtcaataatattttatcaacctactgtttccgtgtcaagattacacttttagtctatcaagaaaatatcatggttttcctgaatcttctctataatctcatggctacttatcccttgaagttctacactgttctgactgacataaagaaacacaagaaacagaaaagtggacaggatcaatctggtagtaaagcttcctctgctattttctttcttatccagatcttctgctccatttcctgcactttgctccagaccatctggatataattcccgatataaacgaccatatcttggatgaattgccggtgttatcataccggtattccgctgtcgtctgcgattttcttcccacaatctacgcctacggacttctgattctttttcctgcacaaaagatcctctccatcttctttttttctagtttatgaaagtttcttctgctttattcttccaggaaaatctgatacagcgttttctaccggtcagccagttctcctgtaatatcttcccaggtaatccctttttctaccatgagaaccattgcatgataaaggaaatcagataattcatacttcacttcctcgacatttggattttttgcagcgatcacaacttctgtcgcctcttctccaacctttttcaggatcttatccaaacctttttcaaaaagatagttcgtataggaaccttcttttggattctcttttctatccgcaattgtctgatatacagactcaaaaatctgaaccggattcttggcatcgtaatcatttccaacaattgttgtatagaaacaggagcggtttcccgtatggcatgctgctccgatctgttctacctttgcaagcatcgtatctctgtcacagtcgattgcaagagatttcacatactggaaatgcccggatgtctcacctttgatccactggcattttctgcttctgctatagtaagtcatgcgcccggttttcacagtatgctcaaatgcttcctcgttcatatatgccatcattaagacttcatttgtcttataatcctgaacaatcactggaattaatccgtctgaattcaatttaaactcaccgaaatccatctggctttcaaaagaagtcatttgaattccattttctgcacaaacttctttaaatttgttaaagtccatatccaaacgactgatgaatcttcctgatataccttttacaccatcactctttaaaatattaaggatctcgttttcatccatcgtatccgtgacaacaacacactgcgtttctgtaacatttacaacagaattcagatccaggcgatgcataaatatcatctctgtactatatgcttcgatcagatgctgctgtttaaacaatgcatcgaaatcatttaatgatacagcgattctctcttttccaaaacgcttggatacttcctcgattaattcaatggaaagtgctttggagaaattcagcattgcacgttttgctccggcataaagaatcttcttcacatcttctgcacgtctgatgtttcctccgacaaccattggaatactgattgcacggttgatctgtttgaggaggttgatcgtctcatcatgttcttcatctgagtctgacagatcgaaaatgatcagttcatccgctcctctttcattgtagtggcgtgcaagttccatcacatcatctgcgatcacagttctgtcatcgaaccactgcaccgctttccctctttctataaaaatacaaggggtcagtcttttatacataatttcttcttactccttctgtcacgccgttaaaggcttccctttgtagaccatacttcttttattcttggctcttctgataccgccatatccagagcctttccgaatgctttaaataaagcctctgccatatgatgattattccctgcatcaaggatcttaaggtgcaggttcattgcagcactataggaaactgcatagaaaaattcacgcaccatctctgtatccattgttccaagcgccggtactgtaaaatctgcctgaaagttcagatacggtctgccggaaaggtcaactgctccaagagcaagaacctcatccattggcagtacaaaatatccgtatcgcttaattccggccttatctccaagtgcctgtgcgattgcctgtcccagtacgattcctgtatcttcgatcgtgtgatgggaatccacttcaagatccccacgcaccttaacatttaaatcaaataatccatgtcttgcaaatccatccagcatatgatcaaaaaacggaattcctgtatcaatctgattctttccctgtccatccagattgatcgtcagttcaatatctgtctcttttgtctttcttttgcagcttccgattctgttctgcatcacactcacagctccttttctcttatttttcaaatcttactttgattgaatttgcatgtgctgtcagatgttctgcctctgcaaatttctcgatatctgtgtggatcttctcaagtgcatttcttgagtaagaaataatgcttgattttttaataaaatcatctacagatagcggtgagaagaattttgctgttccgtttgtcggaaggacatggttcggtcctgcaaaataatctccgagcggctcactggaatattctccgatgaagatagctccggcattacggatctttgtcatcacctcaaacggattcgctgtcacgatctcaagatgttcggaagcaatagaatttgctgcatcgattgcatcctccattgtctctgcaacgagaatatgtccataattatccagggatttctgaatgatctcgcctctggaaagctcttttacaaatgcatctgtctgtgcagatactttctctgcaagttccatacttgttgtaaccagaattgcagatgccatctcgtcatgctctgcctgagacagaagatctgctgccacgaaacgtggatttgccgtctcatcagcaagaacaaggatctcacttggtcctgcgattgaatcaatgcttacgaatccataaaccgctttcttagcaagagctacgtagatatttccaggtcctacgatcttatctaccttcggaatagactctgttccatatgcaagtgctgcaattgcctgagctccaccaaccttgtaaactttatctgcaccggcctcttttgccgcaaccagtgttgtcggagttacctttccatcttttcctggaggtgttaccatgataatctcatctacacctgcaaccttcgccggcatgatattcataagtacagaagatgggtaagctgcctttccacccggcacataaacgccgactctctggagtgctgtcactttctgtccaagaattgttccgtccggtttactgtcaaaccagctgtactgcatctgtttctggtgatagtctctgatattcaccagtgcttttctgataatagcgatcagttcatcatctacctgctcatatgcttctgcgatctcttcttccgttacaagaagatgctctgcgtccagtctgactccatcaaatttctctgtatattcaaatacagcctcgtctcccttttctttcaccgcattcaatatttcctgaacacttgcttcaaacttcccatagttattcgggcttctctttaaaaggtcatccagaagattcttcttcgtattctcattcagtttctctatacgcatttgtctattcctccctcagaagatttcttaaatttgtgatcagctctttgattctgtcattttccattcgcatgctgaccggattgacgatcattcgcgctgacagcgggcacacttcttcaagtacgaccagtccgttttctttcaatgtagaaccggtttctacgatatctacgatgacttcagataagccaacaatcggtgcaagttcgatcgaaccgtttaatttcacaatttctactgtctgatgtttcttgttgtagaaataatctttcgcgatattcggatatttcgttgccacacggatcagttcatgatgtttcagtttttctgctgcctcttcatatccacacacacacatcctgcattttccgaatccaagatccaggacttcatggactttacgtccctcttcgataatcgtatcttttccgacaactccaatatctgctgctccgtactctacataagtcggcacatccggtccttttgcgagaaagaatttcaatcccagttcttcatttacaaaaatcagctttctggaatccttatctttcatttcctcgcatgtgattccaagacgctccagcatctccagtgtcttctttgcaagtcttccctttgtaagggcaaatgttaaatatctcattgatctgctcctttattgctgctttgttttcttttttgtattgaccagcttctcttctcctgtctgaagattgatcacttcaatcttccggtcctctcttaagtaaagcatacttgcaacagaagaacgctttccatacgcttcaaaagtctctctttcatcccaggagtttctcttcatcatctcgacattttttccttttgcacgaaatgacctcgcaagagaaattgcccactgttccgttgcatccgtataaacaagcagattacggtgtcctgtctctactttgatcttctgacgatccagtgcactcataagttcatccagaatgattgcaaatccgatcgacggtgtcttctttccaaacttctcaagaaggtggtcgtaacgtcctccacgtacaactgcatctccggtaccataagtataggcacggaaaatgattcctgtataatatccataacttccgctcatgctcagatcaaaagttacatgatcctctactccgtaaatcttcagcagatcataaatctggcgaagacgttctaccgcaagtcttgctgcttcacccggagcaatgcgtcctgcatctgcaaggatctccggtccacctgtcagttccggaagctgatggaacgcttctttcacctgatcgtcaatctcataatgatcgagaatctcttccacaccaaagaagtttctgttcgcaatcaatgtacggatctcttctttttgttcatcttccagattcgttgcctcgaaaagactctgaataaaatcaacatgtccgatacttacctggaattcctttaggccggttttcttaagtccgtccacaaccattgcgagcatttctgcatctgcctcgatagaatccacaccgatcagctctgcaccaagctgtgtattttctttcaggcgtccacgataactggaatgattgataaatgtatttccggcataacacagacgaattggaaaattctctgtctcaaacagtgttgctactgctcttgcaatggacggtgtaatatccggacgcaacgccagaatattcccctctctatcaaagaatttataaagatctctgatcgatgtcgaaccgatctccttgcggaatacatcaaaatattcaaatgtcggtgtctgtatgtcctgatatccatataaatgcaatacagtattcagctttttctgcaatgccaacttaatggcacattctctattataaatatcccgaacgccttccggggtatgtaacttctgctccatgtctcgttcaccttcctgtcttttcttggtttttcactttagtgtgctaccacgttaaaacctgtttgtaattatacggactttgtaggattctgtcaatccctcgtttccaaatctttctgaattaaatccagatacggcacaaaatagccatttttcagttgaaaaaaccattccggatctaattcttccagccggacactcttacgtcccccactctgcgcgcgctcccagaacttacggatctgtgtatactgcatataataaagctcatttcttgctgtataatagatcagaaaaaaggcaatcccgccctgccgttcaaacttttccataaagtccatctgatgctcatgtacattctgaagtgggaaggtatctacattacactctttcgcatcaaaacagaccgggattccctgcactgctccgatatagtctaccgtacttgctttgtcgaaatacgcaagtgtgatctgtctgtggtctttatccatacgtaccggagtgatcggtgtcgggattttctgcatcagtgcaagtcccatctcactgtatctttcattcgaatgattgataaattcctccagtgtcgaacctctaagtcctctcgagttccatgttgccatctcacatcactccctgcgctttacagatttgttcaaataaggccgggacaggtgctttgatgatctttcctgaaagctgtttgatatctccctcgcaattctccgggaattccagacggtaagcatgcagaagctgggaacgaagtccgtattcctttttcaaaacatcgttaaatgaccggttcccgtatttgtaatcccctgcgatcggatggccgatggatgccagatgtgcacggatctggtgtgtcttaccggtgatcagatgcacttcaagaagtgttgtttccttattttgtgcaagcaccttgtattcggtatcgatcgctgatgcctctttcccattttttgtctgttcagccggttttttctgactcaccgtaactttatttgtcttttcattcttgacgagataaccatgaatcctctgattctcttttacctgcccttttaccaggcaaagataatatttcttaagtgtacggtcacgaaacatctcgcttaatccctgtaatgcctgcagtgtttttcctgctgccacgattccgcttgtatttctgtctaaacggttacagacagatggatgaaatgtatgaagttcttcttccgtgattttcccattttccaacagataatcaataaaatactccacaagagaagtatccgtcggggatgccttctgggagagcattccgaccggtttattgataaatacagcagcctcatcttcatataagatatctaactgtaccttctttcccgctgtctgttttcttgcagaggacgcttttttcttcgaaaactgtgaatgatcgataaagttctcaatcgtctcttccgcaagaaataacttaatcacatccccctgtttcagctgttcatttccaactgctttttttccattcagggtaatattcttttttctcatcatcttatagaaaaaactttttggcgctttattgagatactttgcaaggaatttatccatgcgctgtcctgcctcatttttctggatgctgatctctctcatcgtcttttcctctttacattgatatattcagaataagattacggatttcctgttctcttgctttcgtatctttctgctctactacagcaatattttcaagtccctccacgcgggccagaaacggtgtatactgatttaagatcttaacagtaaaacctgtgtactgattctgcgcaaggattgtcttgatatgctttccaagttcatctgtatttactttctcataatgtgtgtatccgtaaatgttgtgtcccgaaattacgatacagtctgttggcatgatatgctctttgcttgtaattataagatcataacaaactgttaaatgttttgattttcctgcgatttccttcgcctgtgacagttcaattgattgatatggataacgtgcgatcacacctacaagtgcctttgatgccggaagacatccaaggatagcaacaactgtcagaagattcagcctcgtatgtgtctgccagtaaccaagagcaaaaattgccagaacgattacaaaataaataaccgttcttaaaatctccacttttcttttataattcaaataacctggttttcctttttgtattttcttcatttttcatcctattctaaattcatatttgctgcatacgcacgagaaatccatgcggcagcagttttgttccaaagtaagttaatttcattgggattccataaacggagactgacttcccggatctgcagtccttcaacgcctgatgaaccactctgtctgccttcgccattgtcagtttcttcaagatattctgcggtttcccggaaaacttgaagaactccgtatcaaccggacccgggcagactgctgtgacgacaattcctttttttctcagttcttctcccaatgatctggagaagcttaagacataggacttcgttgccgcatatactgagaaatacggttgtgggcaaaatgcagatgcggacgcaagattgacgatcctgctgccagcacgcagaaatggcagacacagcaatgtcattcttgtaagagaccggcagtttacatccaccatatctgtctggatccggaatttttcagacaaaatctcttctacacttcctgacttgccaaatcctgctgaatttacaagcattcgtaaatccggctgttctttctcaagtgcatctctcaattccttatatacctttttcttctgaaggtcacctgcaaaaatccgaagaggaactctgctttctttcgcaagcgcttccagacgctctttgcgcctggcaatcacccagatctcatccagatttttataaaaatatccaagctgacgtacaaattctcttcccattcccgaagatgctccggttacgattgcaattttcatcctgcttcctttcttgaatcctatctgtcagatacttaaatgtacctattttctattcttcttagaatgaacatttctgatagatttcttcttatttttcccttcaactcttcctctgtgttcagaattgttttgtcttttctgaccattcgaaccttttgatccttttttcggttcatttctgccggcttttttatcatttcctgaaccacgcatctgtctcggtctcacaagacatttcggtccgaatccgatcagatcagatcttcctgctttatgaagtgcttcaatcaccagatcatacagctccggattacgatattggatcaacgctctctgcattgccttctcatgcggactcttcggaacataaaccttctgcatcgttctcggatctaccccggtataatacatacaggtggaaagagttgatggtgtcggatagaaatcctgcacctgctccggcatatagccaagatcacgacagtactctgcaagttctactgcttccttcagagtagaaccagggtgggaggacatcagatacggaaccagatactgttctttcccgattctctcattcatcttataaaactgtcttgtaaactcttcatagactttgtgctccggttttcccatcagagacaggacaggccctgccacatgctccggtgctaccttcaactgtccactgacatgatattcacacaactctcttaaaaactcctgtttcttatctgcgagcagataatcaaagcggattcctgaacggataaacaccttcttaacttttggaatatctctcaactttctcaacagactgacataatctctgtgatctgcgtccagattcttacacggagacgggaacagacactgacgcgttttacaaacgccatgctccatctgctttttgcaggatggatgccggaaatttgctgtcggaccgccaacatcatgaatatatcctttaaagtccttatcttttgtaatttcttttgcttcttcaatcagagattcatgacttcttacctggacaattcttccctgatggaacgtcaacgcgcaaaaactgcatcctccaaaacatcctctgttgctgatcagactgaatttaatctccttgattgcaggaactccgccttttgcctcgtaagacggatggtaagtcctctgataaggaagagaataaacatcatccatctccatctgcgtcagtggtgctgccggtggattctgtactacatacagatgatcagaatatggttctacaagacgttttccgttaaatgcatccgtattcagatactgtgtgtaaaagctgcgggcataattcatcttgtccgctttgaggtcttcaaaggacggaaggatttccgcatcataaatactgtctaatgattttgcttttacaaccgtaccggctatatacgtgatatcctcaaccggtatcccggcatccagtgcttctgcaagctctatgatcgaatgttctcccattccataagaaatcacatctgcacccgaatcgagcagtacagaacgtttcagcttgtctgaccagtaatcatagtgtgccattcttcgaagacttgcttcgataccgcccagaatgatcggtgtctttttataagtctgacgaatcagatttccatagactacgcaggcataatccggtcgttttcccatctcgccgcccggtgtataggcgtctgtctttcttctctttttggatacagaataatgatttaccatagaatccatgtttcctgcagagacaagaaatccaagtcttggttctccgaacacctgcacgctctccggcttacgccagtccggctgtgcaatgatcccaacacgatatcctctggattccagaagacgtgtaatgattgcgtgaccaaaagatggatgatcgacataggcatctcctgatacatagacaaaatctacctgatcccatcctctctctttcatctcttctctggtaattggtaaaaaatttcctttcatgctttctccctgtttaacgtaataatgaacagtcacgcaatgcttccagttcctgtcctgttaattctcgatattctcctaatgcaagccgcggatcaagtacaaggctccccatctgcaggcgtttcagataaataacctcttttccgactgcatggaacattcgtttcacctgatgaaactttccctctctgatcgtcagtcggatttcagaaatctcttctcttttcagaatttccagatgagccggaagtgtcggtttctcttccccgatttcaagtccttctgcaaatcttctcacatcttcttccgtaacttttccatcgattctggcgaaatagactttatctacatgcttcttcggtgacaaaagctgatgtgcaagttcgccatcatttgtgatcagcaaaagtccctctgtgtctttatctaatcttccgacaggaaagagatcctttctctgcttttcatcaatcaaatctaatacagtactgtcgtttttatcttccgttgcagaaaccaccccggctggcttatttaacatgtaatattcatattctgcataagcaaccatctgtccctggtaaaacacatgatctttttctgtgtcaatcttgatttccggacgttttaccgtctcttcattaactcgaacctgtccttttgtgattgctttcttcacttctgtacgtgttccgattcccatgtctgccagatatttatccagtctcagtttcatgagttccaccgccatcccggaaggtacttattcttaagcatctgattcacaagctttccaaaaccaagcggatatccatccacacagatcagataccatcccttgtctttcggcttcacaagatcctccacatccaaagtctcgcctttcagatatttcataacgcgttcgtcttctaatggaagatcgatcacctgatcatattcttcctttttcagattcatcgccagtgcctgactcggctcaaaacgattcttcttcagttcacccatcagtaggcctgttcttaagaaacggattccacgaagtgtcggaagtccttccggcatataatatactttctctccacgcagatccatgcgagaggaatcgaattttcgatcaatatgaccaagaaattcttccaattcttccggaagcttcttgttcttcccactctccggaagtctctttccttcttcctgtttttcacccttttgaagaagtgcgaggaaatgtccttctcccttcatacgatgagggaaaatacgaaccgtcttttcaagttccggattcttgctttctgtcacctgcggcattccatctgcaaatccttcgtaaccttccatctcacagatcttaaattccgggtattcctgaagcagatattcaatcgtctgttcattctcttccggtgaaaatgtacaggtggaataaagcagcattccacccgggcgcagcatctgggccgcctgtgtcacaatgcttctctggatctttgaaaaaaactctggtccgtgttcttcccatgctttcaccatctttttctctttacgaaacatgccttccccggaacaaggtgcgtcgatcaaaatcttatcaaaatactctgggaaataagaaacaagctttccaggctcttcacttaagatgagcacgtttccgattccaaataattcaagattcttcaaaagtcccttcgctctggaactgctcagatcattcgcagccagtacaccggttcctccaagctttgccccaagttctgtggccttgcctccaggtgctgcacagacatcaagcacacggtctcccggctctaccggaagacgatctgccggtgtcatggcacttggctcctgcagataataaagtcctgcgaaataatatggatgtttcgacggctggatattatctccgtcataatagaatccattatggatccacggaaccggctctaacggccaaggtgcgatcttcaggaaatcttccacagaaatcttcgctgtgttcacgcgcagaccatagtgacgcggttcatcataacatgccgtatatgcttcatattcagaaccaagaagatccttcattttctcttcaaatacttttggtaaattcatatttattgtttgctcctttgcaatatcaagatcaaaatactttacatttaactatatcatatttccatagctccggtatagtttcttttttcttttcatagaatatttttgtaaaaggaggtttcctatgcttctggctctcatactgctttcactgttttttacgatgctactctttcctgaaactgtattccagggagcttgtgatggcctgcttctctggtatcagattctgataccgaccctttttccttatcttattgtcacaggacttttattgaaaacagatggtgctgctgttgtctcccgtctgcttttccgtcctttccatctgctctttggaacttctttctatggaagtttcgccgttctgtccggctttttatgcggttatccaatgggtgcaaaaatcattgccgaccttcttcttcaaggaaaaatttctcttgaagaagcttcttacctgctgtccttctgtaataatgcaagtccatctttcattattacttttcttgttttaaatacaattcatcagaaagctttctgcattcccgctttactgcttcttttcggaactatgatcctcttaagctttcttcaacggattctaagacatttcatcaaaaataaaaattggattttcccggaaatgtccgaagttttcacacaggagaattccattttttcaaaaccactaacgcacaaaatgaatttttccgtgttagaatcctgtatcctgaacagttcagaaacgcttgtaaaagtcggaggttacctgatgatcttttctgtacttcttgcattattggaacttctgccaattcgttcacctggttttcttctcttgaaatcttctcttgagatgacaaacggaattcttctcctgtctcaaagtctttcccacccccaggttctttatccgttgcttctcgcacttacctcttttggtggatggtgttccgttgcccagacacaatccatgattgccggtacaggacttaaactttcttcttatataatacaaaaactgaccgccgcactggcagtcagtcttttgacatttctctatctgaaatttttataatacaatgtaatgactacctcaggtctccctgtccattctcatcataatatccgtcatcggatggaacttcaagttctgaacggttagagcgaactgtatcgtagcactcctgtaaagaattgatcaatccgtcatactttgttgtataactgtccaaagtatgtccgataatgctttctgcatttgcaagaagatcatctgtatactggatcgcaccaacacggattgtatttgcatccattgttgcattatcaagaatctcctgtgcctgtgctgttgcctgagttacgatctcatttgcctgagcatatgcctgctgcatgatctcatgctcactgacaagctctgttgtctgaacctgtgcttcctcgatcattgcatctgcttttgcctttgcatcagcaagaatcgcatctctgttcgcaataatcttctgataacgtttgatctcatccggtgtcttcatacgaagttcgcgaagtaactcatccagatgctccttatttacaataatctttgttgtagacaacggctgaaacttacaatctctgtctatatattcttcaatttcttcaatgatctgttcaatacggctgctcattgttacactctccttttttctttcatcttttctctgagtgcgatctcgacggcttccggcacaaactgtgatacgtctcccccaaaagcggcaatctctcgcactgtagtcgaacttaagtaagaatattctatacttgttgtcagaaacatggtctctatatcaggcttcatcctctgattcgtctgcgacatctgcagctcatattcaaaatcggtaatcgcacgtaatcccctgataaccacatctgcacctatctgttccgcaaagtctaccagcaatccatcaaatggtataatctcaacattcggcagatctttcgtcacttcctttaacattttaacacgttcttctacagaaaacaacggcatttttgctttattattcagtactccgacaattaatttgtctacgattttacaagatctgcaaatgatatcataatgtccacgggtaacggggtcaaaacttcccggataaattgcttttaacatacttcttcctttccggctttctcaataaatacatgcttgtttgtcttatatctcttctctttgatcaaagaatatcccaattctggaagatatccaaaatctgtatctaacgaagcttctacgatgatcaccgtatcttcatagatcagatccgatcctgcaaggtattccagaactcttttctcaaatcccatattatacggtggatccatgaatacaaagtcaaaaaccttttcaccttccaactgatataatgcgttcatcacatcctttgtcagtgtaagtcccttcttctccagacgtgtgaatttcaaattctccttgacacattccatcgccttaggatttttctctacaaatactgcttcttttgctcccctgctgagagcctctattccgattccgccacttcctgcaaacaaatcaaggaaaatacagtcatacatctgcggacttatcatattaaacaaagtctctttgatccggtccgttgtcggtcttgtctctatcccctcaagagtcttcagttttaggcttcttgcgcttcctgcaattactctcaaatatcgacacctcctgtcattaactatggtgaattttagcagaaaaaagcacccgggtcaatgccgagtgcttttctctttttcatttcttgtgttctttttactgtacatgacagtttttgaaccgcttttctgtctgatgcagaccgcttctgcagacgatttttcttcgcctgttacttttctgccatctgcttctcctgctgttcaatcatctttttaaccatataaccgccgacagaaccattctgttttgatgtgaggtctccattgtagccgtctgttaacggaactcccaactcggatgctacttcgtacttgaacttgttcatagctcctttcgcctcaggtactgctgttttgttagatgaacgacttgccatgatctttttcctccttttgcattttgtaactttactatttagctttgttacgctgttagtatgtggaggaaaattaattttaaactggtaacttctggcaatcaccgatgcagccggattgctccgttgctgtacaattgctatgatccgcaaacatcacaatgttgtttccagcatgatctcatccagttttatccgtaaatgttctttcaatttgcaatgctcagggaattccagttccggatcgtccagaagaagtctgtctgcctcttcacttgcgttttgaagcagctttgcatcttgaaatacatcggcaactttaaaatcaagcacgccactctgccggattccaaaaagatcccccggaccacgcaatcggagatcttcacttgcaataaagaaaccatcatttgaatgattcaggatatctaaccgttccttcgtttcttttgatttcgatgctgtcatgaaaatgcaataggactgatactttccacgaccaacccttcctctcaactgatgaagctgcgccagcccgaaacgttctgcattttcgatcatgatcactgtcgcattcggcacatcaactcccacttcaacaactgttgttgaaacaagcacctggatttcattttttccaaatgcattcatcacttcatctttctctttttccttcatctttccatgcagaaagctgacattgattgaatctcccaacgtttctgaaagcatctcgcaataatcgataacattttccgcttccattgcttcactttcttcaaccatcggacagatcacatagcactgacgtccttgtgctacctgttttcttatgaattcataggccttcggacggtatcctgtatccacaacacagtttttgatcggaagacggttcttcgggagctcatcgatcacagaaatatccagatcaccataaagaataattccaagtgttctcgggatcggtgtcgcactcattacgagaatgtgtggcaggtttcctttacctgcaagcatttctctttgttttacgccaaaacgatgctgttcatccgtcaccacaagtgccagattgtgatagattgctttctcctgtatcaatgcgtgtgttcctataataattgatgattccccactctcaatccgggcataagcttctctcttttcttttgctttcatagatccggtcaaaagttctacccgcagtgggatctgatactgttccaacatgtctttgatattttcaaaatgctgtcttgcaagtacctctgtcggtgccattaacgctccctgatagccgttcaatcctgcaaacagtaatccaagaactgctacgattgttttacctgatccaacatctccctgaacaagtctggacatgacatattgacttttcatgtctttctgcatatcatcccatacccgcagctgcgcagccgtcagttcatacggcagttgtctcaggaattcgctgatttgaggctgatcttcaaaatggaatccgttcttcatcctgtcctgtgtatttttaatttggcgcagagaaagaataaaaacaagaaattcctcaaaaacgaatcgttgtcttgccgcaagaaatgcttctttattctccgggaaatgcatctcccgcacagattgttcataaggccggaaatgatatttcttcgtaaattcatccggaagaaagtcatcctgttcccgcacctgttctaatgcctgacgtagtgctttgattactgcattgtttgtcagacctgctgtcaatccataaacaggctgcatggtgttgatcttttcctgataacggactgccggatcgtaaatttccggatgttccatcacaagggaatctcttttcttcacaaccctgccgcggagaacaactgctccttttcgcccaagtgtatttctcaaaaacggcattcgaaaccagattacctttattgttcctgtcagatcctttaaatatgcagtcgtgatctgtcttccttttcccggagaaacctgtacacgcccaaaaacactgccgcagatcgtacagacttttccttcctccacttcactgattggaaccggttctccaaaaatctcataccctctcggataataatgaatcaggtcatccactgtgtaaactccgattttttcgaagagcttctccgttttttcgcccacacctttgattgttccaactcctgattttttactcatttatgtctgtctcctaaacaaaataaccggaacacttttcccaaatgtcccggtctgttcctgattttaatacagtactgctgttctgtctctttactgacagttctccttattcaacagaaagtacataatagtagattggctgtccaccggaatgtacatcaacatctacatccggatataaatcttcaatctcctgtgcaaagttctctgcactctcctcctgtacatcctgaccataatacagactgatcagctctgtgtcttcatccaccagctgtgcaagcatctcttttgttgtctcttccacagactgtccgacagcaagaattccactgtctccgattcccatgatatctccctcatggatctctttgtcatcaatgtgtgtatcacggactgcataagtaacctgtcctgtcttcacatttccaattccttcgatcattgcttccagattcgtctgtgcgtctgcatccggcatatagttaatgatcgcagtaattccctgcggaactgtcttggaaggcacaacaataatatccttatcctctgtcagtgtctgcgcctgattggcagcaagaataatgttcttgttgttcggaaggataaaaatatgttctgcgttcacctgatcgattgcattgagcatgtcttctgtacttggattcattgtctgaccgccttcaataatatagtcagcaccaagctcacggaaaatctcattcattccttctccgatagaaactgcaataaatccgacttctttgcgtggctccgcctttttcgcttcagcctgctgtgcagccagcttctccgcatctttgatcaatctctcctgatgctcttctctcatattatcaatcttcatacgtgagagctgtccgtatgtcagcgctttctggattgcaagtcccggatcattcgtgtgcacgtggatcttaacaatatcgtcatccgctacacatacgatagaatctccgatagactccagatatgctttgaactctgtctcatctttcgctgtgaattctttttccagcatgatgataaactctgtacaatatccgaatttaatctctgtttccgcctgttcagaaggcttcaccatctttgtgccggcacttgcctcgatcgcagaataatcaatctcttttccctggaatgcatcgtatgcaccacgcatcacttccagaagtccctgtccaccggaatctactacgcctgcttcttttaataccggaagcatctccggtgtcttttcaagaacttcctgcgcatagttgatcacttctgaaataaatgtatccagatcttctgttgtctctgcaagctctgccgctttctgggatgctccctttgctacagtaagaattgttccttccttcggcttcataacagccttataagcagttgcagttgcacgttcacatgccttcgcaagtgtaattgtgtcaatctctttatgttccctgatctcctttgtaaagccacgaagaagctgggacaagataactccggagttacctcttgctccacgaagagagcctgaagaaattgcttttgcaatcgccaccatatcaggattctccagcgcctttacttcttttgccgctgacaggatcgtcagtgtcatatttgttcctgtatcaccatccggcaccggaaatacgttcaattcattaatgaactccttctttgcctcaagattcgctgctcccgcaagaaacatcttctgaagcaattcggtgtttatcgttttaacagccacaattgttcctccttaatctatcactctgacaccttcaacgaagatgttgatcttatctactttcataccagtaaattcttctaccttatattttacattattcataaggttgtcagaaactgaaagaatattcactccataggaaacgatcacatgaaaatcaagcgtaattacattatcttctgtgatctcaacatgaattccccttgtcaggctttctcttttcaaaagatgcacaaggccatctttcatattaactgctgccattcctactatgccaaagcactcaattgccattgagcctgcatattttgcaatgacttcaggattgattgtaatgattccaagatctgtactcatacttcccttcatcatatatttcctccaattctataggttctttccatatataacatgactattatactattactttttgttttttacaatacagttttgatttttttaaaataacacttgcattactcgaaagtttctgatagaatatcattgttatgagtctaaaagaccagtttagattgttaggaggtgcagtcatggctaaatgtgctatttgtgaaaagggtgctcattttggaaacaatgtaagccactctcatagaagatcaccaaaaatgtggaaatcaaatgtgaagtctgtaagagttaagacagagggcggttctcagaaaatgtacgtttgtacttcttgcctgagatcaggactcgttgagcgtgcttaattctcgtttgatgattcaatatgacacggtataaagaactttatctgtttattcggataaagttctttttttatctgcagaacaaacaatatgccagtacaataccggtaattgcgatcacagttccccataagacatcagaaagcagcatcatgacgatcattcctgctgcaaaccaaaacaatgcaaatccaaaaactttcttcacaatactgctcccaatattttctatattctagtaactattttattctgcatccagaatatctgctacatcttcttctgttaatttttcatcttttgatgtaaaacggtctaccacatcaggtaccatatccaaaagttttgtaattgtatcctgattcttgatattcacaagtttcgtctttccatcctgaataacgatcacagcactcggtgtgatctttccaccgattccaccgcctgctctgtctttcttttcagcgttaaaagaacctgctccaataccaaaagagacatctaccaatggaagaatgattgttccattgatatggatcgcatctccgacaactgtctttgatgaaacaacgctgtccattccctgaaagagtgattctactgtttctttaaatttgtttccgtctgccataatcctgactcctctcattttatatattttctaatgtgtttgtaggtaatcttcacatctttattccagaatagcttccatgcaggaacagcaaagtaaataacccggattttcccttctgcagatgcatttccctccagctttcgttcttcaaaatccggctggatctgaacacactcaccaatcagtccgtaaatgctccccagaaaagctaacatatatcctgtccaggaaggatcactgaatccaaatgtaacattcgcctgaagctttttaggcttcagaacatgcaacagatggcatagttctttcttcactgcctcgaatgcccgttgatgtttctcataagttaaaaaagcggtcagaaattcttttttctctcctgctttttttatagtaccacagagtttctgaaatgtatatttgattcttttcaatttagattccgtctgtacgttttcgggcctgcgctcctctcgaactttcgtcttttctgtctctggctctttttctgatgctttctcaattttcacatctttttccggtggattattctttacttccgtcttcttaccttccaaaggttctttttccaacggctcaggaaccaccggcttctctgacgtttccttttgttcctcttccgaactgtcaaatttcttccaggcaagacgaagcttccattttaattctccatgttcataagacgctgatccggaaatcagatgaaacagccaactgacctttccatatgccacaagggtatcaagtgtattctccccttttgcagaaaatctgtatttcaccggataaaacaagattgttaaaatcagtaagagtaaaattacgagcaaaaaaagaagaatccatccaattattttcagtataagaaacaggatatgtatcatacgcttcgaatctcctttttctcaaactcttcctgacgatccaaaagaaactttctcaagtttacctctcccgtcttctcatatgcttcttccgcaatcctttcgatcagactcaatgcgccatcatacccattcgcaattccaacaataaataaagatgcattgtcaaatatatgttgctttaaaagaatcgacgaataatattctaaatggttctgctttccctgtgaaagcgtaattacatagacagaaggctgcagtttatttttctgcaatttttttattaatttcagttttttcttttcccagccttcgctgacatataaatcacagaaaaattttgtctgcatcttttctcctcccattagttgtaataggcgtctaaaatatccccggcgattgccactgcttttccgctggaacttccatccgaaccttctgtgatcacactgattaccagatccggattatccacatttgtaaatcccataaaccaggaatgtgtcttttctccatctgacatactgtactctgctgttcctgtttttcctgcagcagtataggatcttccttttaagacagatcctgttccttcctctacaacagctgtcatatattctttcaattgtgcagcttcatccgatgtcatgaccttcttataacttttcggaacattctttcgtatctgggaacccgtataattcgtcacactttccacaagatatggctgcatcatggttccaccgttcgccactgcctcggcaatcagtgccatatgatatggacttactgttgtctttccctgtcccattgccgtcatcattacttctccctcactggaattctgatccagtgcaaaggagctcttcgctgtattcagtacacccggaagcgatttattgaacaataaatcttccgccgtctgacggtattgcgtcagatccaggccaagaccaatattggcaaaagatgaattacaggaatttgcaaaggaacttctcagatcctctgagccatgtgcatttccattaaagcagtgaattgtaatatctccctgtgaaatctctccattacaatcatatgtataattcggataatcactgttctgacgcataaaagcaagtgttgtaaccactttaaacgtcgatcctggagcataagatccttgtgtcacacgattcaacagcggactgttttcttcatctgaattcaattctgaccagtcacttaaaatattattcggatcatatgccggtttggaaaccatggcgagaatctttcccgtactcgcctccattacgattgccgcacctttgtttgatccaagcgcatcataagccgcctgctgcagatttgcatccaatgttgttacaactgtatctcctcgattcttcttttcactgaattcattctgcagtttttcaagaaagaatgcatttgatgtcagaagctcaaaattctctaccgattccaggcccgtagttccaagtttggaatcactgtatccgatcacatgagcaaacacttctccataaggatactctctcgtctctgatccatcatccccaacggctgtctgtgcaagcacatttccattcttatcaacaatgcttcctcgtataatcgtatctgcataagcatcctgtctttgattatatggactgttcactacaagttttgcccgcacgaccataaaatatacaagatatcccatcaacgcgataaagagaatcacgaaaaagtaagtgactctagcgaactctttgttccgaacgcgttctccgctgtctttgctgccgctgttccgggacatcctcgaatctcggtctgctttttgttgttttcttaccggtcgttcttcccgattcatttcttaaatccctttctctttgtcttgctctgtctctgttatctccatcatattctcttcgtctgtcacgtccatcctgacgggatcttcctgattttgcattcgaactgctctggcggcgtctttcattctgcctgctgcggtttctctgtcttgcgcgctgcatctcaatctgatgctcttcttctgcttcttcatcttctctgacaatgtagagcccctgaataatcccaaacatgatcatcgtacttaacagagaacttccaccataactgacgaatggaagtgttactccggttaacggaatgaactttgtcactcctccgatctgcagaaatacctgaaaaatatagcaggttcccagaccaagtgctactaatttatagaagaaattacgcaattccatcgcaatattcaaaaacatcacataacagctgacgcatacaaggatcagacacagtgtaaaaatcagtcccatttcttctgtcattgcagagaagatcagatccgtctctgcaactggaatcgtatccggctgaccacggaataatcctgttccaaaccagccgccacttccaatcgcaaacaacgactgggcaatctgatatcccccttcgctataagctgcaaacggatcctgccatgccgcaactctgaccttaatgtgggaaaacagatgatatccaaccactgcagctccacaccctgctgccacacctgcaattgcatataatggctgccttgtcgcaacatatagcataatcagatacacaataaagaagattaatgcagctcccagatctgttgacaatacaaggatcagaacatgtgctgccgctatcgcagtcgtaacaacaacattcttaaattctgtcgatttattcaggcttgctgctacaaaaaatacaaacagaatcttaacaaactcagaaggctgcagactcacaggtccaatattgaaactcagctttgctcctccaagcgttgctgcaaacaatgcaacgataagaagtgctgctcctccaactgctgcatagatataagtccagttctccaggaaagtcatcttccggatcagaaccggaacaataagaccaaaaacaataccaacgacaacaaataccagctgacggattgcaattccataaggagacttactctgtgcggaaagccttgtgatcataatcattcccgctgtgatcaacatacacatattattgacaaccagtctcgaaacattcgggtagatcagattgtataataagatgactgccatcacaatcactgccagtgcaccatatatgaacatcatcctcagatcctgcgttgcaaaatacattgcaataaatgcagtgatctgtatcataaatagaagtacatcctgacggatcaatactttgttttcctcatcttcataacttctcgtaaagattgaaaaacaggaaaaagtatatgccgccatcaagatgatgataaggtatttggatacctgaataataatattagccatatttcacctgcttcaaataattcctctgttgaaatgtcctgttgtaaaatctgtatcttcttttcctctggcaacagttttttcatctgttaagaaaaatgtattcagaactgtttctgtctgttctttatcctccagagtaaactggatacgacgcatctttggatacaattcattcactctgtcccattcctgtcttagattgatcggattttccgtataaatcacattataacagagatcacaatagttacgcgcaaagaatttttcgtctcttctgtcttgaagcactcgtactcccggtttcttagaacagcctgaagttgttctctcaatacactgtgcagataccataaccggaattcttccgtaaacaagaagttcaccgtttctgatatcaagttctcttagttctctgctgttaagctccaacggagctgtaaaatcctcaactttttgctggttccaaaattctttgccatactgattaaagatatatagattatggtctaatataatctttttgtcaaatcctctttcttttaagaaaaagaaagcttcaaaatttcgaataacaacgccgtcaattggcaattgattaaagttttcaaattgtcttccaaaccattcctgcgcattctctctgaaaatatgtggaaataccagatacaattcaactccgctttttctccaaaaatcaatcctgtctctgacatgtgtgtctaaaaagcctgtgccaaacaaccggaaatctaatgcaatccggccaatcctttgagttccctgtccataaagttcctctttctgattcaaaaaactgaacacggcctctaactgttcctctgtttcaataaacacagaatatctgttcagatttccatttcctgtctcttctttaaatgtttctacctgtgtcgttgaaggattgcattccctgtaaaaagcagttgcgatctctcttctcaatccatccagtgctgctcttcttaaactattcagctgctgcatcggaaggaatgcatcctgatccatagatatttccagatctttcaggaaaaatagcgtaccgcctgtcttcgcaagctgtgtgcgaattctctcttcctccaatgggcgcttctgtgcacgttcaactgcatgttctgtatatgctgtataagaaaattccctgcagcagaccgtaaaagatgccggatatccaacctgaagactcaaaaatccataaatctcctcctgccggtcttctttcctgtatttctggtccaaactctcaatcagttcttcatttcggattcttctaaaaacaaagccttctttgaaacgcatccccttcggcacaagaaaacgtaacttttctccctttgtgatcttcttgccaagtgtataattatctttcccgctaccgatttcaagaacatcatgtgcatgcagatctgtcaaagcctgagctgtgacctcacgtccattttgcgacagacatctggctgctgctactccggcatgattcggacgatccagtgccagcatttctcttccattatgctgcttataatatccggtatctgaatcaccgcgattataaagatccatcaggttttcgcggtcttccggtttcaccgcataaccacttttcccttttttcaaatataaatccacatatttccgatacatagctgttactgctgccacatattccggtttcttcatgcgtccttctatcttaaatgagtcaatcccggcttcaaccagttccggaattaattccaacgtacagatatccttcaggctaagaaaatatttcttctgaccatctactgtataaggaagtctgcatggctgtgcacattgaccacgatttccacttcggccgccgatcacactactcatcagacactgtccggagtaacaatagcaaagtgctccatgaacaaaacactctacttcaaggtccgttgtttcatgaatctgtcgaacttcttccaacgaaagctctcttgccgggacaactcttgccgccccctgactctctaaaaacttcgctcctgccgcaccagtgattgtcatctgtgtactcgcatggatatcaagatccggaaaattgcttctgataaattggaatacacccgtatcctgaacgatcaccgcatccaaacctttctcatataatggtgccagataatcatacagttctgcaatctcatgatcttttaataatgtatttactgtaagataaaacttcttcccataaatatgagcacgctcaattgcttcgatcagctcatcctgtgtaaaattgtttgcatatgctcttgctccaaaacgtgctcctgccgcataaacggcatctgcacctgcattcattgctgcctgaaaacatgcaaaggatcccgccggagccagaatctccacctgtcggtcttttctcattcttctgtcattatccttctctttattattatattcacataatctatgagaaacacgctccgcgagtttctcaagttatcgcgacaatcgccaaggtcttgtgcaagtacggactttggctcgttgttcgcgtaaatgaaaaaggctgccaaagtgacagcttttctcatttaccttcttcggtttttcatctctgtctcgagcttaacaatctgcatctgaaggtcattattctcttctttcatctttgcaagctctttctcagcattctcaagtttgatctgggctgaaatcaattcatgcttcagatcatacatctctttatccttgagctcgatatcgctttccagggaatctccctgtttctttgctttaaaataatcatctgcaatattaagtgcaagaaggacattccttgtgtctgcactctgttttctgtatccttcactgttcgtacattctgtgattttatgattaagataggaagatactttctgcagatactcttctccttcaaagccactgagagtatagacttttcctccgattaatacttctgtaaaatgttttgctgaactcatagcttcctcctcgagtttctattcttctattatagactatttatcctcaaaaaccaactattttttcagaatttctatacttctctcggaattccaagatgttggtaagctaattctgttacaacacgacctcttggagtcctctgaatgaatccatttttcaacaaatacggttcgtaaacatcttctaatgtgcctgcatcttctgaaatcgatgcggcaagtgtctcaagtcctaccggtcctccctggaacttctcaatcattgtgatcagaatgttacgatcaatatgatctaatccgaatttatccacgtcaagaagatctaatgcataatttgctacttcttttgtgattacaccatcatatttaacctgtgcaaagtcacgcactcttttcagcagacggttcgcaagtcgcggtgttccccttgatcttctggcaagttccatagcaccttcttcttcaatctctacacctagaacatgtgcagaacgcagaatgatcgtcttcaactcttcttcattatataactccaaatgatgcactacaccaaaacggtctctgagcggtgctgtaagcattcctgctcttgttgttgccccaaccagtgtaaactttggaagattcagacgaacagaccttgctcccggtccctttccgatcataatgtcgatcgcataatcttccattgccgggtaaagcacttcttccacctgacggttaagtctgtgaatctcatccacgaataatacgtcatgttcctgcagaccattcagaattgcagccatctcgcctggtttctctattgccggtccggaagtaatcttcatatttacacccatctcattcgctatgattcctgccagtgttgtcttaccaagccccggcggtccgtaaaacagcacatgatccagtgcttcgccccttgctttcgctgcttctatataaatactaagcgtcttctttgctttctcctgtccgatatattctgataaaagctgcggccttaactgtccctctatcttactgtcttcttccagattctctgtcgttataattctcttcgccataaccgacctctcatttcataactctttacttcaaattttgtaactgttcagagcagattctttaacgcttctctcaaaagatcttctacactcgcacaatcaacagataccttcttcactgcacgtaaactctctgcacttccatagccaagtgctgtcagtgcctgtaccgcttccgcctgcattccggtatctgtcgcctcaatttcttttgactgttcactgccatgtgctgcctgttccagaacatcctcaatgctcatcttatctttcaactccagaatcagcttttccgcggtcttcttcccaattccaggagctgatgaaattgtttttacatctccggccaacacggcaaaacgaagttcatccggagaaaggcaagaaagaatattcaacccggctttcggtccgatcccgctgacaccgatcaacagtctgaaaacctgaagatcttcgcctgttagaaatccatataattgcattgcatcctcacgcacgttgagatatgtatgaattttcacttcttccccaactgccggaagcatggataatgtctgctgcgacatataaattccgtatccgattccacccgcttccacaatcgctttctgctcctggactgctgccagttcacctctaatatatgatatcatcttcctctatccttttcccgctgcaccaaaaccgcaacgcttccataataattataccagagaaattccctggatcctttttaaaacttcttttgccacaagtccgatcagcagcccggtcacttctcctgccactaacaagaccggcagataataccccacctgatacgtctgtacaacaaccattgcaacaagaagctgcccgatattatgtgctgtacctccgccaatactgactccggcaacactgaaccagtctgatttcttaaggagaaccataacaaggaaactcaaaagtcctcctgataaactatatagaataccaaacagatttccgaacatgaagcccgataaaataatccttgtcacggaaagtgccagtgcctcttttatccccatcttgtacaaaacaagaactgtcataagattcgccagaccaagttttgctcccggtattccgaaattaatcggaatcaaaagttccacatagctaaaaatcaatgccaatgctgtaaatacgccaaatatcgctacttttctaccgtgcaatctcatccacctccggttcctctccgccacggatcgttactatagtctgattcggcaggcagattatactttccccatctcttgaaattgctctgtgatttacacaaatctgatccggacagtcagcatcttccatacgaacctttctgtcctttatgagtactttattcttatcatttacatcaatttcctgatcctgttccaagcggtatcttccatacaactcgccatttacctgaatctctacttcactgtattcatctgtagtttttaagagctgtaaaccaaacgttaaaacagctacaaaaaaaatagctgctgcaagtatccagtcattcttcttcattccgcaccatctttcttccataatggttttgctaattcatcatagcacaaccatattttgaatgcaaccacatgttcgattgtatttttattcaaacctcgttataataaacacatcattcatttatattaagaacggagattttatgaaacacaaaaaaatactggcttgtttccttgctttttcttttctgctgaccggatgttccacaaaagatcagtcacagccgctttctatgacaggaacctatttcgacactgttgttaagattgaagtctggggagcagattctaagatcatggatggctgcaaagatatctgtgagaaatatgaacaactcttaagtcctacgatcgattccagtgaaatcagtcagatcaatcaggcacaaggtgcctccgtttctgtatcgaaagaaactgctgatttaattgaactgggaaaatattatggggatctttccggcggaaaatttgatatcacaatcgcttctgccagtgatctttggaattttcatgataatgcggatcatagcatccctgacgcagagcagctgtccgaagcagttactcatatcaattataaaactatagaggtcaacggaacaacggtaacaatgtcagatccttatgcaaagattgatctgggtggtatcgccaaaggctatattgcagatcaggtaaagaattatcttgtagaagaaggaatagaacatgcctatatcaatcttggtggtaacatactgacactcggtggaaaaacggatggttccaacttccggatcggtatccagaaaccatttgcagaagacggaacagtgatggctgttcttccggtatctgataagtccatcgtatcttccggaaattacgaacgatactttaagaaagacggaaagatttaccatcatatccttgacccttctacaggatatccaatagaaaataacttaaaccaggtcacgatcatctctgacaaatcggttgacggggacgccttaagcacaacctgttatgcacttggactggatgaaggattaaaacttatccgaagtatggataatatagaggctgtatttattaccgatgacaatacgatttataaaagcagtgactctgtcgatttaatcactgatattgataactaaagaaaaggaagctgatcattttaaatcttcagcttccttttctgatctcttttttcaataaaatcctgttgtattattaacgtaacgtaataatctttcttgggcatttttctacacaaacaccacactctgtacatttatctgcatcgatatgtgcaaggaaattcgttacagtgatcgctcctgcttcacagttcttctcacagagacgacatccgatacatccggcctgacagattgtcagctgtacttttccttttgcattggaattacagcgtacaaatgtcttctgctcatatggaatcagctcgatcaggtgttttggacatgctgcaatacattttccacatgctttacatgcttctttgtcaacaacagcaattccatctactacatgaattgcatcaaatggacaggcagcaacacaagaaccgaatccaagacatcctgaattacatccctttgctcctccattctgcatcatgcttgccatcgtacaatcctgaatacctgtgtaatcataatctaaaattgctttttcacaagttccggcacattttacaaaagcggtctgtctctcctgtgtgcctgctgcaacacccatgatatcaccgatctttgcagcaaccggtgccccaccaaccggacatccactgacttctgcttcaccttttacgattgcagctgcaagtcctgaacagcctgcataaccgcatccaccacagttatttcccgggagaacgcctaaaatcgcttcttcacgttcatctacttttacagcaaacttcttacctgcgattccgaggaaaacaccgatgaataaaccggttccaccgacgactactgccgccaaaataattcctgtcatactcatttgctcttcctcctaaattaatcccgagaatccgaaaaatgcaattgccatcagtcctgctgtaacaagcacgatcggagtcccctgaaatgactcactgatatcattgtattcaatcttctcgcgaattccggccatcagcacaattgatacaaggaatccgacagctgtagcaaatccatttacgacacctgtgagaagccccatacctgcactcatgtcatcatagtagccattctgtacgtttgtcagtgctactccgagaactgcacagttcgttgtgatcaacggaagatatacaccgagcgcattgtataatgatggcatcgccttctttaagaacatctctacaaactgtacaagtgctgcgataacaagaataaatacaatcgtattcaggtaagataattctcctcccatgatatttggatttccgagaataaacttatagatcaatccagttacaaaagatgcgatcgtaataacgaatacaaccgctccgcccattccggcagcagtcttcacattcttggatacaccgaggaacggacatataccaaggaactggctcaggacaacattatttacaaatgctgaaccaactgcaattaataataattctttcactttctgtcccctcctttattcgttctttgcgtcttcttcgcctgtcgggaagatctttccactgcaggatgaagcattcccgcagcttgcacagccttctccgcatccaactgtctccggaaccttctttcctttctttgccatattgttctttactttattctgtaaagcaacaagaccagcaaggacaaagaatgctcccggtgcaaggatgaagattgtcagtggctcgtaagattccggcatgacacggatatcaaagatcttacctgcaccgatcagttctctgacaataccgattgctgtaaggccaacagtaaatccaagtcccataccgattccatcaaagatagaaggaagaaccggattctttgaagcataactctctgctcttccgaggatgatacagtttacaacgatcagaggaatataaagtccaagtgaatcataaaggcttggaacgaatccttccatcaggaactgtacaattgttacgaaagaagcaacaataacgatgaatgccggcattctgacagaatccggaataatctttctcaacatagaaatcaacatgttagacatgatcaatacaactgttgtagaaagtcccataccaacaccgttgattgcagatgttgtaaccgcaagtgtcggacacataccaagcataaggacgaaggtcggattttcttttacaaggccgttatacagccgttctgtacatttattcattacttccgcctcctaactcattttgaaaatatacaagtgcagagtctactgcatttgtcacagcattggttgtgatcgtagcaccactgatggcgtcgatcatgtcatctcctgactctcctgtctttgtatatgtaaacttttttacattcttatctttaaactgatctttgaaatctgcttccttagctttcattccaagacctgctgtctcactgatactgagcatctcaatacctgttactgttccatcttccctgatacctacagaaatatcaatgtctccgccgtatccttcatgtgatgtaacatttacgacataaccaaccgtctcaccggaagcgtcttttccctcagccaactcagatatatcatctgaagtgtatccattttctttcagaagagcagaagctgcatcagcatcaaattctgtatccgattcaaatgtctctgcatctgaaagaacagaacgaaatgcttcctgttttgccttctcctgtgctttcgcgatcggatcttttgtcacaccatatacaactccgagaaggagacctgcaacaacagtgattgctgtcagaatcaacgtgtttttaacaattttattcattacttttctcctcctttaccaaatggttttggaagagtaaccttctcgatcaacggaactaaaaggttactgatgatgatcgcataagaaactccttctgctgatccaccaaaaagacgaaacagacccgtcaggcatccaagacagattccaaaaaggatctttcctttgctcgtaatcggagatgttacataatctgttgccataaaccatgctccaagcatcagaccaccaccacaaagatgcgctgtgatgtactgaggatcgaatccatgccctccaaacaatgtgataaaaatcacaaatgtcacaatgtaagttccaggaattctaagatcaattacatccataagaatcaggaacattgcaccgatcataattgcaactacagaagtctctccgattgttcctctgatatttccgagaagcatagacaatgtattcactgtttctcctgctttcagttctgccagaggagtcggtcctgtcactccgtcgtaaacaaaataagtcatctttcctgcaaaacagatcagcagaaaacaacgtgctcccaatgcagggttcatgaagttctgtccaagtcctccaaacaactgtttcacaacaatgatggcaaatactgcaccaagcacgcccatccaccacgggagtgtcggaggaagattcaatgcgagcagaagtcctgttacaaccgcactgaaatcattgatcgtaattggcttatgcattaatttttcataaagatactcagataaaacagccgctgccgttgtaacaactacaagaatccaggcattctcatgacggaaattccagattccgaaaaatgtagccggaagaagtgcgatcacaacataaagcataatgttgctgcttgtcactttatcacggatatgcggcgaagaagatacgttatatttctcgttcactttacttcaacctctcttatttcttctttctattcgccaatgctgtcttacgcattgaaccaattgcctgtttcagctgacgtttcgccggacagacataactgcaggaaccacattccacacattccaatccattccatgcaacaaaagatgcctcatcttttctctttgaaaaatctgcaagtctggatggaataattctgcttggacagatctccacacatcttccacagttaatacatgcagtctcaagactctttgccacaacgtcttctttaaaaagcagaatagaggaagaagtctttgtaaccggtgcatccattgtcaccatggcaaatcccatcatcggtcctccggagatcagtttctgcggttccgctttcaaacctcctgctgcctcaaccagctctctgtggtttattccaaaaggagccataaagtttcctggtttttcgactgcatcgccgctcactgtaacaacacgttccatcaacggtttccctttgattaccgcattgtggattccaatcaaagtctccacgttatcaacaatacatcctgcatctgccggaagcatggtagaattgattgctcgttttgtcactgcatagatcaactgacgttctgccccctgtggatattttgtcatcaatgctttcacatcaattcttggttcgccggcaactgctttctgtaacttttcaatacaatctttcttgttatcctctacagcaaaaacacctcttgcatttgggaataaagaaaggatgaccttcattccgctgacaagatcttctgtatactcgagcattcttctgtaatctgcagtgatataaggttcacactcagcacagtttgcaataatatattctatcttatccggttccttcggagaaagctttacctttgtagggaatcctgcaccacccattcctacgattccggcatctccaatcttattaatgatttcttcccttgtcatctcttccaaaggctttaccggttcatattcaacttccttatactctccatcattttctacaacaatgcactccacctgggatccagttggattaaaacgttgttccaatcctttcactttaccggagacagatgaatagatcggagaagatacaaatcctcccgcttcagcaatcaactgtcctttcagcacacaatcgccttttttaactaccggtttagccggtgctcctatatgctgcgaaagtggatagaccagttcaccctgaggtactacaggtctgattggctgatcctttgaaaaacgttttccatcatccggatggattccgcctttaaatgtcaaaagccccatctcatttccttcctttcttttatcattgtcattacaacaataatattttaattttgtaatacttattttactagaatgcactctgaaaatctagcaaatatgtaataattcttgtatctttcgctatacatcttgtcgaatttttaacagaaaaagaacctgccaatggcaggttcttctaaaaaataatttatatcttattcctctgtcgcttcagcgttgtcagcctcaagagctttcatgctcaggctgatcttcttctctgcttcgttaagatcaacgatcttagctgtgatttcctgtccgattgcaagaacatcagatggtttctcaacatgagctcttgaaatctgggatacatgaagaagtgcgtcaactcccggtgcaagttctacgaatgcaccaaagtctgtcatacgtgcaacttttcctgtaactactgtacctacagcgaaatcttctgctgcatttacccatggatttgtctctgggaatttcaggctgagcgcaatctttgtatcatgaatgtcttttacaagaactttcagtgtatctcctacatggaatactttcttcggattatcaactcttccccatgacatctctgagatgtgaagaagtccgtcaacaccaccaaggtcaacgaatgctccgaaatctgttacattcttaacagttccttctactgtatcaccaacattgagtttcgcgaacagctctttctgcttctcagcacgctctgctacaagaagctgtcttctatcaccgatcacacggtttcttctcgggttgaactcgctgattacgaattcgatttcctgtccttcatacttgctgagatctttctcataagaatcggaaacaaggcttgccgggataaatactcttacttcatcaactgttgtacaaataccgccgccaagaatctgtgtaactgtagctttcagcacttcgtggttttcatatgcttcgcgcagtctctcatttcctttttctgcagccagtctcttatatgtaagaagaacctgaccctctccgtcatttactttcagtaccttaactgtcattgtatcacctacggatacaactgttgtaaggtcaagagactgatcgttggaatattcgctctttgtgatgataccgtctgctttatatccaatgttcaggataatctcatccggtttcacgtcgattactgtaccttcgacaacctctccattgtgaattgttttaaatgactcttctaacatctgttcaaaagataattctgacattattttgaacctcctcaattatattgttgggcgtggatgcccctgctgtaatacctaccgtttccactgaccctaattgattcaaatccaaatcgccaagtgtctgtatatagtacgtattgttacatgctttgcggcatatttcaaataacttctgggtattggaactatgtttgtcaccaataacgatcatagcatccaccgtctctgctatgctctgcgcttctgtctggcgctccttcgtagcattacagattgtatttaaaacacttacatcataactctttttttcaagaatttcaactaattctttaaatttattgtaattaaatgtcgtctgggcaacgatacaaatcttttttccctgctcacaagaataattttctgcttcttcctttgtctgaaagacctctacatgatctcctgcccagcccttaattccctgaacctccggatgttccggatttccaatgataataatattctcgcccatctcactgtgtttctgcacgatattatggatcttcttaacaaatggacacgtagcatctacaatctggattttcttactttccaatctgtcatacacatcttttgccaccccgtgagagcggataataacagttcccttttccagtgtatccagctcctcttcgctgcgaaggacgatcacacctttctgctccagatctttcaccacttcttcattatggataatcggaccatacgtatagatcggaagattctgattctctttcacctgttcgtaaactgtatccactgcacgcttaacgccgaaacaaaatccagctgatttcgcctttattactttcattctatccaactcctgcaaatttatctatgacaatatctggaaatcgtgtttacaacttctttcagtgtcatatctgaactgtcaacaagtatcgcatcctctgcttttttcagtggcgcgatctttcttgtcatatcacggtagtctctttcttcaatatctttctctatctctttcagatcgcactgtactcccttttcaacaagctctttatatcttctctttgctctgatttctacgcttgctgtaagatagatttttacatctgcatctggaagcacatgggtaccaatgtctcttccatccatgatcacatccttctctcttgcaagcgttctctgaagttccaggagttttcctctgacttccggaatcgcagatgtcatagaagccatatttccaacttcttctgtacgaagctttgctgtaacattctctccatttacatagatctgctggattccgctttcataaccaatcgttacttccacatctttgcaggcctctataatcttttctgtatcttttggatcaattccaagattcagaaagtgaatggccaatccacggtacattgcgccggtatctacataaatatatccgttttcttttgcaacctgctttgcaattgtacttttccctgcccctgccggtccatcgattgctacattatatcccatttttattcctccatcttttctttctacattccatcttcaaatctaacagtaacatctattcttcctgtcacaggattcagaaattccccagtaaaatttcaatcacatcctgcgttaattccggcaagataccctgttgaccacgcaatctgaagattatatcctccggtcactgcatcaagatcaagcacctctccggcgaaatataatcctttcattttttttgattccattgttcccggatcgatctcctttacagatactccgccttttgtaatgattgcttcattataactgcgaagccctgtcaatgtcattgtaaaatccttgatcagatgaaccagtctctgtcgttcttcttttgtaatctcattcacttttttctcaggttcaatctccgagagttctatcataacgggctttaattttgccggaaagagtgaatcgattgaatttttatactgtttattatggtttgcatcaaactctctgaggattcttttatcaagttgttcctcactcaatgccggttttaagtctatatgaagtgtaagttctttttttcttaaagtttttcccaccacactgctcgcgctcagaataaccggtcctgttacaccataatgtgtaaaaagcatttctccgaattcttcgtagagttttttcttcccatctgtgatacaaatttctatatttcgaagagataatccctgcaattctttcgcataccattgtctgacttccatcggtacaagtgatggaaggagttctgtcactctatgccctgtttctttcgcaaaacgatatccatcgcctgtagaacccgtagaaggataggaaataccacctgtcgcaacgatcacagcatctgccttcattttctttccattagttaataaaaccccacacactttatcctgttcacaaagcagttctctcacctctgtgtgaagagaaacagctactcctaatgattttaactctcttgaaaatgctgcgatcacatcagaagaatgatctgaaacagggaaaactcgttctccacgttcaattttcgtcttcacaccaagctcttcaaagaaatcgatcacctgctgatttgtaaaactgtaaaatccactgtataaaaatttcggattacttgtcaccgccgtaaataaatcttctatatcagcggcattcgttatattgcagcgtccttttcctgtaatgaacagctttttcccaagcttttcattcttctcaagcaactgaacattctgaccatttcttgcagcgaaaactgccgccatcatcccggcagccccgccgcccactacgatcacattactcatgctctattcttctcctttattctgtctgtaagactcgttcgttcctgcgctgccaccttcctggctgctttcttctccgctgtaaacctgatattcaccccagattttctccagagtctctaatgtcgagacaacttctttctgttttttcatacagattgcaacaatcagagcattgatcacactcaatggtgcaacaagtgaatcgacaatagatgccatatcacttcttgcgatcaaattgcaggaagaatactgattcataggtgaatggatactgtcagtaagtgtgattacttttgcctttctattgctcgcaaattccaatgctttcaatgttctcatcgaatatcttgggaaactgattcctataatcacatctccttccccgattcgaatgatctgttcaaaaatctcactggaactgtttgtatttactgtaattacattgtcgcatacaagattcagataaaatcccataaaagaagcaagtggtgcacagcttctgattcccacaacataaattctctttgcttctaaaagggtatcaatcgcccagttaaatgccttatgatcgattgcagacaaggtcatcttgattttctcaatgtctgactgaagaactgtttcaaggatctcactctgtgtaattcgtccataggtcacttccatacgctggattgaattcaacttattacggacaagttcctccaatgctttctgaaattccgggtatcccctatatccaagctgggttgcaaatcgtacaaccgtagattcactgacacccacaatctctccaagacgcgccgctgtcagaaatacagccttatcataattttctttcacatattctgcaaggcgcttctgccccttgctcatcttctcatattttgcttcgatccttccgatcagctcattcatattcgcttcaatattgcgttctgatgtttccattcttttacactattcctaatccctaaatatttcattgtccgtccagcagcttcaacagatacataagagttctgtcatacctctgctttgctgattacttcacagcccgcgtgtactctttcagccagattcgttcttcctctgaaaggtaaggggacactttttcataaacctgcttatgataatgattcagcatttctttctcttctgtactcattttctccggcaagattgcatccagatcaattggtacataagtaagaatttcaaaattcataaactgtccatactcattcttaactgtttttctgacaagcagctcattttccagacgaattccatgggaaccctcaatatagatccccggttcatctgtaatcaccatattttcttccaatgccggagccggtctctctccctctttccaacggaaattgatcggtccttcatggatattcaataaataaccaacaccatgccccgtcccatgattaaagtttaatccttctttccaaaagacctctcttgcaatacaatccagattcgcaccactgcatccatagagaaatacagtgtttgccagacgcagcattgctcttgcaactagtgtgaaatgttctttttcaatattccccacttctccaagtgcaaccgtacgcgtaatgtcagtagacccttccaggtaatgacctcctgtatctgtcatgaaaagctttccttcttttaaagggacattgcttttctcatccgcactataatgaacaattgccccatgttctccatatgcactgatcgggccaaaacttggtccgaggaaatgctcctgctctgcacgtaatccttccagcctggcagaagcagacaactctgtaatctccactctgccaatattcttctttaaccagtacataaactttgtatgtgcaacagcatccttcaaatgcgcttttctcaaattctctgcctgtatttcatttttaactgacttcatcaggatttccgggttctgcttgtcgacaattactgtatctttggaaattgcctgatacaaacgataattcataattttagaatccaacagaactttatcttctgatgtcatttctgaaaccacgcgataaatatcttcatatggataaatttgtatctgattctctgcaaataaattcactatttcttcagaaaatttctggctgttcgcaaacagctcaactgaattattataaacgattgcgtaagaaagaacaagtggacaatatgcaatatcattacctcttatattgaaaagccatgcaatatcatctaaacttgataaaatatgagcattgcatccattttctttcattttttctcgaattcgttttaatttggattcaatattctcgcccgaatattcgtcttccaacaaaaatgccggctctgtagacatttcaggtctacctgtccaggtgtctggtgcaagatccagacgaaattcgatagatgcaccttccccttctgcgatctgtcgatatttttccccttgcgcatagctcacagtacgcccatcaaacccgagaacagctccttcttcgagctctttctttaagaattcttcgattgtgggaacttccggctcacccgatttatagagtgtgatcccactccccttcaactgggcttctgcctgaataaagtatctgccatctgtccacagcccagccttctctcttgtaaagactacagttcctgcagatccactgaatcctgtcatatattcacgaaatttaaagtaatcacctacatactcactatgatgataatcatctgtgggaatgatatagcagtctatattctgctgttccattgcattttgtaatctctctattctgtctaaaacactcatatctgccgttactgaaaacttataaaaagttataaacttctatgtttcattcctatttcaacgagtatgcttttgatgatataaatatctatctactcacaagttcttgtactctccataggcgtaaattccggactaacgtatccgtacatatttgcattaacgtttcagtgttagcttgcaaatcgttctccataagccttgagatttatagatgcctggaaatctctgtcaatcatattcccacattcacatctataaaccctgtcagataacttcaaatcttttttgatgtttccacagcagctgcaaagctttgatgatggataaaaccgatcggccacaataagctggatccctttatcattgcatttacattcaagctgttttctaaaccaaaaaaatccttgttcctgtactgctttggataaatgtctatttttcatcattccgctgacattcagatcttcaatacaaataaatcttggctttcgatttacgatctcagatatggtctgattcaaatagtttttacggatatttgttaatctgtgatttcgttttaataaaagtttttcctttttgattacattatttgttttacagtaactttcccctttcttatttttctcgtaagaacgagaaatactacgctgtaatctacgtttctgtttttctagtttctttactttctgactcttattgatgttcttatacttaacggcatcagagcagacagctaaatctttgattcctaagtctatgccgactccatcatcattaagtgtttccttgcaatcaggaaattccacacatacactgatccaccagttcaatccatcaaaggatattcgcggattcatatatttaacatctgttggaatacgtccatgttctgcaagtcttacccaatttattttttgcttatttgctttcctgctggaagaaaagccctcaaacctaacgtgggtattactgaattgtatcttaacgttgtcctgatagaacttcggcattgatctctttctggacttgaatcttggaaatttttgcaagcccttgaaaaagttcttatacgcagtacaggcatctttgattgcctgtttggttacattatttgaaatatttaataaccatgcatattcatcagaatgtctaagctttgtaaattcttttctgagttctgaatctgaaataaattttccacctttttcgtagttttctttttccctggccaaagcccagttataagcaaatcttgaagctcctgcgtactgaaacatcttagttttctgtacgttgtttggtatcaacattacttttatggcttttaccatctgtttcctcctgcatcaattctcgaataagtttcttagctttgttcgctcgttttccttgtaatttgcaactgaatactgtgattatttgaaccagatcttcaacaagttcctgctgttcagaataatatctatagccacttacctatgataccaccaaataaattttcttacaaatgaaaaagaccagaaaacacaaatctttcaatctgttatcttctggtctttctattcaattcataatctaactaaatcagtcaggattataccggataagatccgttctctgtatctgctactgtagcatctacttttgtctgctgagcctgtctgtatttgaagaagtcaacagcaacctgtgggaacagtgcatatgtcagtacatcctcatcctgctggatccactgtgcacactctttacgaagtgtatcaagctcatccgggataagatctgccggacggcaagtgatcggttcttcatctccaagagccttcttctgaagttctggatcaaccggttttgttgtcttaccgtatttacctgcaagcacatcctttgtctcttttgtgatcatcttataacgctcacccatcagtacgttgaatacagcctgtgttccaacgatctgtgaagatggtgtaacaagcggtggctcaccaagatctttacgtacacgcggtacctcttcaagtacttcgtagaacttatcttctgctccctgctctttcagctgggatgtcaggttggaaagcattcctcccggtacctgatacagaagagtcttgatattaacaccaaggttcttcggattgagcagtccgctctcaagagcatcgtcacggattggacggaagtagtcagcaatctctgcaaggagactctgatcaagtcctgtatcgtatggtgttcccttgaatgtctcaaccataacttctgtagccggctgagatgttccaagtgcgaatggagacattgctgtatcgatgatgtcagctcctgcctctacagctttcatgtatgtcatggaagcaacacctgatgtgtagtgtgtatgcatctcaatcgggatatttactgcatctttcaatgccccaacaagctctgttgtcttatatggaacaagaagtcctgccatatccttaacacagattgagcttgcacccatatcttcgattctcttcgcaaggtctacccagtactccattgtgtaagcatcaccgagtgtataagacattgcaacctgtgcatgagccttctctttgttagcagcttttacagctgtctgaaggtttctcatgtcattaaggcagtcgaaaatacgaatgatatcgattccgtttgccacagatttctgtacgaaatactctacaacatcatcagcgtatggacggtatccaaggatattctgtccacggaacagcatctgaagttttgtattcttgaatccatcacggaactttctaagtctctcccatggatcttctttcaggaaacggagggaagcatcgaatgttgctccaccccagcactctacagcatgatatccaaccttgtccatcttctcaacgattggcatcatctgctctgttgtcattctggtagcaatcagagactgatgtgcatcacgcagaatagtttctactattttaactggttttttttcaatttctgccatttatttatcctcctaatttacttaacgccgaaaatagccataaatgttccggctgctactgcagtaccgataactccggcaacgttcggtcccattgcatgcataagaaggaagtttgtaggatctgcctcagcaccaaccttctgagatacacgggctgccataggaaccgcagatacaccagcggaaccaatcagcgggttaaccttaccatgtgtaaggacacacattaacttaccgaagagaactccggcagctgtaccgaatgcaaatgctataagaccaaggataacgatcttgattgtattccagttcaggaatgcttcagcacttgttgtagcacctacagatgtaccaagaagaataactacgatgtacatcagggcattggaagctgtctctgtcagctgtcttacaactccacactctttgaacaggttaccaagcatcaacataccaacaagcggagctgttgtaggaagaatcacacatacaacgattgtaacgataaccgggaagaggattctctcaagcttagaaaccgggcgaagctgatccatcttgatctttctttccttctctgttgtgagaagtttcatgatcggtggctggatgatcggcacaagtgacatataggagtatgctgctacggcgatcggtcccatgatagctgtctgctgcagtttacctgcaaggaagatagatgtcgggccgtcagctccaccgataatggagatagcagctgctgctttgtctgaaaatccaagagccatagctccaagataagctgcgaaaataccgaactgagctgctgcaccaagcaggaaactcttcgggtttgcgatcagcggaccaaagtctgtcatcgctccaactccaaggaagatcagagaaggaaggatggaccactcgtcaagctgataaaagtaatacagaagtccaccagttccgttcgctgcatcctcagcatgaagcataatatccggatagatatttacaagcaacataccaaaggcaattggaacaagaagcagtggctcaaattcgtggcgaattgccagatagagaaacacgcaggcaacagcaatcatgatcaggttaccaaatgtaagattcatgaacgctgtctgttctacgaggtttcccaatgtatttgaaatatattccatttgtaaaaacctcctggttcagttactagtttaatgtagcaagtacagctcctgattcaacagcatcacctactgccacatcaatgctggcaatagttcctgcctctggggcaacaactgggatctccatcttcattgcttcaatgataataactgtatctccagcctctaccttctgtccaacagatgtaggaacctggaatactttacctgctgctccagcttttacctggatgcttccagcgcctgctgccgctttcggtgctgctgccggagctgccggtgctgctgctctaggtgctgcaaccggtgctgctgccggtgcgcctgcaccattctcttctactgttacatcatatacatttccgtttactgtgattgtatagtttttcatctaattatcctcctgattaattccatctgtttgattttcttctcttaatagaacgaacaacaaatccatctgtagaagttccctctgctgctgcaattgctgctgcgattactgctacaagttctgcatcatcttctgctgcagctaccggtgctggagctgcctgtacaggtgcttccttcttctcttccactttcttatctttatttgccaacttctcctgaagtttcggaatgtatccaagcagataaataatgaatgaaatgaaaatcaatacaacgaatacagttcccataccaagtaccgtattcaaaccggctttctcaaggatttctcctgttgaataatgagcagaaacatccatactctccatgttgcccttttcgtcaaaactgaagacgatgtctgcatctctgttttcatattttgcttcagatgtgagtgaaactccatcgttctttacttccattgtccagtcgccatgttcaacataagcaccgcactcttcttctgctgcttcccaggagctgatcattgtaaggaagtcctctccatcaaccggaagtcctgcattcataagctgtgtgtcaagctgaagatcacgcatattagaaaagctgtcaagctgctctgttgtcatcgcttcgaaattctgaacaacaaactcagcatactgttctaatgttacctgatcatattctgttgtctcagacttaccacatcctgtgaagctaagaacgagaatgaggataagtcctaataaactgatttttttcttcacttcgcctcacctcactaaaccgttccgtgtttcttagccggacggtcctctctctttgtgaacagcatctcaaatgctccgatcacatattttcttgtatctgccggctcgatgatcgcatcaacatatcctcttgctgctgctgaattcgggcttgactgaagttctttgtattcagctgctttctcattaagagtctcagcatctgcgtctgcgtacatgatctgtgctgcaagcttcgcatccatcattccgatctctgctgttggccatgcataaacaagatctgcaccaattgacttactgttcatagaaacgtaagcacttccgaatgccttaccaacgattacatttaccttcggtactgtagcgttagcaaatgcatatgtcagttttgcaactgcgcttgccatgttcttctctgactctactgtagcagcaaatcctgttacatttgtcagtgtaagaaccgggattgagaatgcatcacagaagttcacaaaatctgttgccttcttgcatccgtctactgtaagaacgctgtcgaactcagcctctacttcagcttctgcattgtatactttagagcggtttgcaacaacaccaactgtcattccgttcaggcggataaatcctgtaaccatctcttttgcgtagtctttctttgtctcaacaagaatctgattgtcagcaatctgtgccagtgcgattgctgtatcttctgatgcgttagcaatgtctgcgcagatacggttcaggtcatctgtgcattcctcataagacatatcatcttcgttgtttgccggaagcatacatacaagatcacggatctgtccgaggatctctgcctctgcaccgattccgtctacaagacctgctgtcttgctctggtagtcagcgcttgctgtgttacacttggaaatctcatttccttccagtgcgtttggagaattaacgaaaagttttccgtcttttgcttccataaatgtaaaatctgtaagccccggaacaactgcaagaccgccgccgcacattccaaagattgctgtaacctgcggaatcacacctgatgcaagtgcctgtttgtgataaaggcttccaaatgcctcaagtgcatctgtagcttcctgaagtctgagtcctgcacagtcgatcagtccgatcaccggtgctcccatcttcatagccatatcatagattcttgcgatcttcttcgcatgcatctctccgagtgctccacccagaacgtcagcatcctggctgtatacataaaccaggttaccgtcaatcactccatatccagtgataacaccgtcagaaggagctgccttctcctgcaagttgaaagttgtgcttctagctgtaacagctccgccaatttcaacaaagcttccctcatcaagcagtgtggcaattcgtctgcttgctgagttttctgttgcattgtagctcatattttagccctccatacttataaaataattttaaaataaaccaaaatttctgcctattgtattatatactaggtcgattgaaatttcaattcatattttccgcaaattgacatttttttcacaggacattgtttttgtcgagcttggattcttctgttccgaataaagtttccacttttgcactaacatccgcagaagcgcgttctatggttgcttcatccacacggcccgctccacctcatcccttcgaatgtctgttagcttggaacagagcactcaccgtgtgtggtttgtgtctgtcccaagctaacaaacagaacgaagtgtattcggaaccgctcttatgccttaatcgtggatgaagcaaccataaaacgtgcctccgctacgttatctaaagaagaagtttttattcccaaacaaaacgaatccagaagacaaatacagaattaacagccgggagaaggtagagctttgtcgatgaagatttcttgatcttttgactttagtttctgtattttcgagtgaattttgtatttgtaggagaaagtttaattttgaactacgcaagcaagaacgggtctactgttgccaggggcacatgtaaggcaggagcgttccgaatacactttgttcagtatgttaataagagccagaacaggcaccacacacggtaactgttctggctcttatgttacatactttcaaagggatgaggtagagcgggccggtgcccatggtaatagtagacccattcttgcgaccattctgtcaaaaacttagcccattgtataaattccctcgataaattacagtctcttcgctattgctttaataaactcctcactattgagtactgtcggattctcgattgttgtgatcaaagcgaggtcttttgtcatctctcctgcttcgattgtgtcgattgttgctttctcaagtttatctgcgaagtccatcagatctttgtttccatccagctcgccgcgttttctgagagctcctgtccatgcgaagattgttgcaactgagtttgtagatgtctcttcacctttcaggtgcttataatagtgacgctgtacagttccatgagcagcttcatattcataatatccgtccggagatacaagtacagatgtcatcatagcaagtgaaccgaatgcggaagataccatgtcgctcattacatctccatcgtagttcttacacgcccagatatatccaccttctgatttcataacacgggcaacagcatcatcgatcagtgtgtagaaatactcaattcctgcctctttgaactgatcagcatattctgcatcaaagatttcctggaagatatctttgaatgtatgatcatatttcttagaaattgtatcctttgttgcaaaccacaggtcctgttttgtatccaaagcgtaggagaagcagcttcttgcaaagctttcgatggatttattgatattatgcattccctgtacgattcccggtccgtcaaactcatgaaccagttcttttgtctggcttccatcttctgctgtgtatacaagttcaacctttcccgctcccggaatcttcatctcggatcctttatatacatctccataagcatgtcttgcaattgtaattggtttcttccagttctttacacatggctcaattccttttacaacgattggagcacggaacactgttccatcaaggatcgcacggattgttccgttcgggctcttccacatttctttcagatcatactcatccatacgtgctgcattcggagtgattgttgcacattttacggcaactttgtatttctttgttgcgagtgcggaatcaactgttacctggtcatctgtctcgtttctgtgttccaggccgagatcataatattctgtcttgagatcaatatatggctcaagaagattatccttgatcatcttccagagaattcttgtcatctcatctccatccatctctaccagtggtgttgtcatcttaattttttccatcttttgcttcctcctgattatgtttttcttctattttctttagattctgcatgacatgaacaatatgttcctttgcaagctgttctgccaaatccgggtttctgtccctgattgcctgaagaatcgctttatgctcctcaattgacttctcggctcttgccttcacattgatcgaggactttcttgccatttgaacatatcggtgaaaatctgtaagaacatgacacaacatcctgcttccggaagcctcatataatatcgtatgaaaccttccgtctaatcctgtcacttgttctttattgtatccattttctttcttcatctgaaattctgaaagtaaaatagtctcttctaattcttctaactggtcttctgtaatatgttccgccgcccatctggcgcacattccttccagatacttacgcatctgatagatatcccagatatccttctggctgattccggtaacataagcacctttattcggtacaatcgtcacaagaccttctaattcaagctgtcttaacgcttcccttactggagttctgctgaccccgagttctttcccgatggtagcctctctgagttcatcctgttgtttgtatctgcctttgaggatatcttcacggagtctcttaaaaacacgtcctcccagagaacggtcctgatattcttccatgatttcctcctattctctttttgtatgattgtatacgattatacaaatattgtcaagatgatttcatgctgatatcattgtattaaaaatgtatccatttttgcataatacttctccatactatctgttcatttttatatgctttgtaccctatcttatttatcaacttattgtatacaaaaaggtggtctctcacatagaaaaaccaccctgttcttttcgttataaatcagctttcaaaatcagcttagccaaatttacacttcatttactttttatttgatcacacgcacaccaagtacatctgtgattgattccagtttacttacaacttcatcagaaacgcttccgtccacatcaattactgtatatgcatattccttcttgctcttatttgtcataagtgcgatattctgattctcctgtgcaagaagtgttgtaaactgaccgatcatattcggcacattacggtgaagaattgtaattctgtctccgtcagcttttgttcccacgttgcaatccggataattaacggaatgtgtaatatttccgttctcaaggaaatcacggatctcagcaacagccatctgtgcacagttgtcttctgactcttctgtagatgctccaagatgcggaattacaattgcgccttttacacctacaatttcctttgttgggaaatctgttacataacggtgtactttacctgctacaagtgcatcaacgatatcttcctgatttacaagaacatctctggcgaagttcagaattacaacgccctctttcatcagactgattgcattcttgtcaatcattccctttgtactgtcaagtgcaggtacatggattgtgatataatcgcactctttatagatttcatctactgttgttgcgtgatggatacttctggaaagtctccacgcagaatctacggaaacatatggatcatatccataaacttccattccaagatgtgttgctacattcgcaacaagaactccgattgctccaagtccgatcacaccaagtttctttccggaaagttctgttcctgcaaatgcttttttcttcttctcagcaatctttgcgatatctccatcttcctcgaattcctgtacccactgaattccaccaacgacatctctggctgcgagaagcattcctgcaatcacaagttcttttacaccattcgcatttgctccaggtgtattgaatacaacaattccttcctctgcacatttatcaagcggaatattattcactccggctcccgcacgggcgattgctttcaggttctttccgaattccatctcatgcatttttgcactgcggacaagaatcacgtcagcttcatccgcattttctgtctttacataattttcatccaacttattcatgccaacggcagaaattggattcaggcaatgatatttaaacatcttacagattctcctcttcaaatttcttcataaagtctacaagtgcaacaacaccctcatatggcattgcgttgtaaatgctggcacgcattccgcctacagttctatgtcctttcagattctcaaatccagcttcttttgcttccttaacgaattttgcatccagatctgcatcgcctgtcacgaatggtacattcataagagaacgatcttccgggacaacagttcctttgaacagtttgctctgatcaaggaaatcataaagaacttttgctttcttttcgttgcgttctttcattacttcaagtccgcccatcttcttaagccatttgaagactttaccacagatatagattccgtatgccggtggtgtattataaagagattttgcatctgcatgtgtcttatatgtaagcattgtaggtgttcccgggagaacatcctctgtgatcagatcttcacggatgattgcgatcactacaccagcaggtccgatatttttctgaactccaccataaatcattgcatattttgttacatctacaggttcggaaagaaaacaggaggagacatctgccacaagatcttttccttttgtgtttggcagtgttttaaattttgttccgtaaatagtattgttttcacagatatatacgtagtctgcatcttctgaaatcggaagatcggagcagtccggaatgtatgaaaatgtcttatccgctgaggatgcaacaacattcacctttccatatttttctgcttccttagctgctttcttagcccactgtcctgtgacaatgtaatcagcaaccttattcttcatcaggttcatagggatcatagcaaactgctgtgacgctccaccctgaagaaacagtactttatagttatccggaatattcatcagatctctgagatcctgctcagcttctgtgataatttcctcgaaagctttggaacgatgactcatctccataacagacattcctgttcccttgtagtccagcatctctgctgccgcttccttcagtacttcttctggcagaaccgccggtcccgctgaaaaattatacactctactcatttttaattacctcctgttattgtgtatctatagaaactccgttttcacagattttctcacataaaaataaaatattcctttatttatcagccatacaactatgtggctgaaacttattatttttagttttcttttgctttcagatcctgctcatcaaatgcttcgctgatcggtgctcccggcgcaaccataggccataccttatcatcacagtcgatcatacaatcgatcagaaccggttttccacatgtcaatgctttcgcaaagcactctttaaactcctcctgtgttgtagctcgaagtcctactgctcccatcgcttctgcaagcttcacatagtcaactgcatcacggagaactgtcgcagaatatctttcatcatagaaaagatcctgccattgacgaaccataccgagtacatggttattaactacaacctggataatcggaacatcatgtcttacagctgttgcaatctcattcatattcatacggaaacatccgtctccggcaatatttacaacaattttatccggacatcctgtcttcgcaccgattgctgctccaagaccatatcccattgttccaagaccacctgatgttaaaagtgttcttggtttcgtatatttataatactgtgctgcccacatctgatgctgtccgacttctgttgtgataattgcttctccatttgtctgacgataaatttcttctactgcaaatggacctgtaagtacatccttatgatatgttaatggatatttcgccttgtaatctttaatcttattcatccattccggatgagactgctgtggaagatgctcatttattttcttcaggactgctttaatatcacctactaccccaagatcgatcatgacattcttatccatctctgccggatcaatgtcaatctgaagaatcttcgcatcttttgcaaatgttgcagtatttccggttacacggtcactgaatcttgctcctgttacgatcagaagatcgcattcacttactccaaagttcgacgcctttgttccatgcattccgagcattccggtatatctctcatcagttcccgggaaagctcctttccccatcagagaatctgttaccggtgcatctaccttctgtgcaaattcataaagttctttacttgcctcagaaagaacagctccaccacctacaaaaatatatggtctctgcgcttctttgatcatctcaacagctttcttgagatcctcttcttctgaatagattacctctcggttatatacacctggatattccttctcatactctgtaactttcgcagtaacatccttcggaatatcgatcagcacaggccccggtcttccagtcttagcaatacgaaaagcctttctgattgtttctgcaagctttgttacatctttaacgatataactgtattttgtaattggcattgttactccagcaatgtcgatctcctgaaaactgtcttttccaagtaatgggacaccgacattacatgtaattgcaacaatcggtatagaatccatatatgctgttgcgattcctgttacaagatttgttgcgcccggtccgcttgttgcaaggcagacccccactttccctgtagctctcgcatatccgtcagccgcatgtgctgccccctgctcatgagaagtcaggatgtgacggatctcatcacggtgtttataaagttcatcatatacatttaaaattgctccacccggatagccaaatacagtgtcaacgccttgttctttcagacattcgatcacgatttctgctccatttaactgcatgacgtactctcctcctggttctttattttattttgccttcggtacttcgagaattgctccgcggttacctgatgttaccatagaagcatatcttgcgaggtatcctgtcttaaccttaggttctcttggctgccattttgcttttcttgctgccagttcttcatccgatacatccagctctaatttcagttccggaatattgatcttgataatatctccctcttctaccagtgcgatcggtccgccaactgctgcctccggtgatacgtgtccgatagaagcacctctggatgctccgctgaatcttccatctgtgataagagctactgtagacccaagtccgtatcctgcaatcgcagatgtaggattgagcatctctctcattccagggccgccttttggtccctcgtaacggatcacaataacatctccaggattgatctttcctgtcttgattgcttctgtcgcttcttcatcactttcgaagattcttgccggtccttcatgtacaagcatctcgtcacatactgcagaacgttttacaacacttccgtccggtgcaagatttcctttcagtacagcaagtccgcctgtctgagtatatgggttgtcgattggacggataacttccggattcttattctcacatccggcaatattctctcctactgtctttcctgttacagtcatgcagtctgtgtgaagaagtcccttcttattcagctcattcataactgcataaactccgcctgcttcgttcagatcttcaatataagtatgacctgccggtgcaagatgacaaaggtttggagtcttctcgctgatcgcatttgcaaaatcaatctcgaaatccataccaatctcatgtgcgattgccggaaggtgaagcatgctgtttgtagagcatccaagtgccatatcaactgtaagtgcattaaggattgcatcttctgtcataatatctctcgggcggatattctttcttacaagctccatcacctgcatacctgcatgctttgcaagctggattcttgcagaataaacagctgggattgttccatttcctttcagccccataccaagagcctctgtcaaacagttcatactgtttgccgtatacataccggaacaggatccgcaagtcggacatgctttattctcaaattcgcaaatgtcttcgtcattcatctttccggctgcataagaacctactgcttcaaacatactggaaagacttgttttacttccctttacatgtcctgcaagcatcggtccgccgcttacaaatactgtcggtacattcacacgggcagctgccatcagaagtcccggtacattcttgtcacagtttggaatcattacaagtccgtcaaactgatgtgccatagcaagagcttctgtagaatctgcgatcagatctcttgttacgagagaatatttcataccgatatgtcccatagcaataccatcacagacagcaattgcaggaaccatgattggtgttcctccggccattgccacgccaagtttaactgcttctgtgatcttatccagattcatgtgccccggtacaatctcattataagaacttacaacaccgatcagtggacgatctaattcctcttctgtaagtcccagtgcattaaacagagaacgatgtggtgcctgctgaattccttttttaactgtatcacttctcattttaaaatcctctctttctgtaacaactgctaattacttaatatattcgcagatcttatctcccatctgggctgttccgatctgttcttttccttcagacataatgtcgattgtacggtatccgtcttttaatactgctgcaacagcattttcaatcgcatctgcctctttatcaagatcaaatgaaaatctcagcatcattgctgctgaaagaattgttgcgatcgggtttgcgattccctttccggcgatatccggtgctgaaccgccacttggttcatacagaccgaattttgtatcgttcagacttgcacttgcaagcattccgatagaacctgtcaccatacttgcttcatcagataaaatatctccaaacatgttctctgttaggacaacgtcaaactgtgccggatccttcacaagctgcattgcacagttgtcaacaagcatatgttctaatgtcacttccggatagtccttcgctacttcctcaacaacttttctccaaagtctggaagagtcaagtacattcgctttgtcaacacttgtgaccttcttgtttctcttcattgcaatatcaaagccacgttttgcaattctgcggatttcattttcattataagtaagttcgtcttttgcggtaaggacaccatcaatctcttctgtgcttcgttttccgaaataaagaccgcctgtcaattcacgcatgatcattagatcaaatcctctgtccgcgatctctttcttcagtggacacgcacctttcagttcatcgtagagaactgccggtcttaagtttgcaaaaaggttcagtccttttctaagctgtaacaaacctgcttccggacgttttgatggttcgagctgataccatggagaagtcttcgcatcaccaccaatggaacccataagaactgcatcactgtcttttgcaagctgaagagtctcttctgtaagcggcaccccgttcacatcaattgatgctcctcccatcagaagctgcgtgtaggaaatagaatgaccataaactttcgctgtctgatccagtaccttcattgcctcctctacgatctcaggaccgattccatctcctttgattactccaattttcatttccatatctaactcatccttccaaaatgtaaaaatctttttttatcataccgcatttttttcactgtttcaagtatttcaagagaaaaaatagagggcgctctgtatttttatcgaaaattgtacttttcgggcacgtttttatataaagtaaaagaccagaaagagtcacactccttccggtctcatttttcctcttattcagcacctggcttctcaatctgagcgatcgcagccttctgcataggaatacggcaattcttattattaccgaactcaacaatcacgtcatcatcagtaatatcgatgataacaccataaaatccacttgtagtaagcgctgtatctccaatctccatatcagcgagcattgcctggattctcttctgctcctttttctgaggacgcatcagaagaaaccacataccaccgaggataacagcataaacaacaataatacctactgttcccattgaaatttcctcctgactatttcttaaacctatctgtccagtactttttaagtactaatagacaataaatctactatacacaaaaacagcttctaattcaagtgtttttctaatattccatgtatatttaagtttatttttatacattttctataaaattaaatcagaaacactatttctgttccatgccttccaattttctcttcttgtatgcctggaattcccctgcatcaatcgcatcacggatttcttccatcattgtattatagaaatacagattatgaagtacacacagacgcattccgagcatctcttttgctttcaaaagatgtctgatgtacgctctgctgtagcttctacatgccggacagttacatccttcctcgatcggacggtcatccagttcatatttggcattaaacagattcatctttccatgatttgtatatacatgcccatggcgtccgtttcttgacggatatacacagtcaaagaaatccactcctcgatctactgcctccagaatattagccggtgtaccaacacccatcagataagtcggcttgttttccggaagatgcggaaccactgcatcaagaatacggtacatctcttcgtggctctctcctactgcaagtccacccactgcataaccatccagattcagttctgcgatctgctgtgcatgtgcaattcggatatcctcataaattccaccctgattaattccaaacagcatctgatgtggattgatcgtatctggcagagaattcagtcttgccatctcatccttacagcgcttcagccagcgtgtcgtacgctctacagaattcgtcatatactttctgtctgccacactggacgggcactcatcaaatgccatcgcaatcgtggatgcaagattagactgaatctgcatgctctgttccggtcccataaatatcttatgaccatcaatatgtgaattaaaatgaactccttcttccttgatctttctcaactttgcaagggaaaatacctgaaatccgccggaatctgtcagaatcggtttatcccagttcataaatttatgaagtcctccgagtttcttcacaacttcatctcccggacgaacatgaagatgatatgtattagacaactccacctgcgtcttaatccctctcagatcatctgtagatactgctcctttgattgctgctgctgttccaacattcataaaaaccggagtttcaattactccgtgaactgttgtaaagcgtcctcttttcgcacgcccgtccttctttaaaagttcatacataagcttttttcctcttcttttctttttgattttcagactatcaaagcctgccaatagttatggcaggctatatttatctttgcatttcctttaattatgtattataacaggtgttcccatactaagcattccgtaaagacttgccgcctggtctaatggcatattgatacatccatgagaaccattcgtctgataacggcttccgccaaaacttggattccatgtcgcatcgtggaatccgactcctgtccaggtcacacgcatccagtatgctaccggcgtctgataaattggctttcctgttgaaggatctattgttcctgtaagaactttatccctcttcatctcaaggatcgaataaactcctgtcggtgtctctcgctccggtgtaggaagtcctgtaacaacgtctgtctctaattgtacagctccgttaaccacataccacatgtgctgagccgggatatctacttccagataagtcgttccccaatcctgcgcgtcatgtgtagctgccgtctgtgcataagcaggttctttctcgacaacctcacctttcttaatgctgtcaacaagcgcagtcagttctgctgcctcgtcaactgaccagccgtaagtacctcccgaaacgtctactgtttttcctcccggagttgtaatacttcttgtcgttccaaccgtatcataagtctttccaaattcacgaagccactctttcacctttgactcatcaagcgttgcattcatattatcatcatatgttacccagcctgaaatcagatccttgtttacaaccacattctggtttgtcatcttataagtgatgctggctttcagataattgttcatcgcatcacaggctttctgaacttccggagactctgaagtgtactttggcatagcatagcacttctcatccatcatatttaattcactcttaaagtttgtgatcgcatccttcacttttgccttaaatgtatccacatctactttcgtaccataaacttcaggttcaacaacaaaactgttcccatcatactttggataagcagactgtggatctgtctgctcctgattcagagcctgtacggattcaatctttgactccaacgccgcttcatcatatccgacctcaattgtgacctcagctgaactttttgagaaaaatgactgtggccacaaaaatgcattctgtttcttcagtgcatcctctatatctgaattttccttatatacaagtgaaatatccgatccctcgattgcatctgtcatattattctgttctacaattgtcagtttataatctgccacctgatttttaatataattctctaccgccgccgcattcttaccagaaaagttctttccgttaatctgcgtattaatatagaaatgactcataaaaaagactgatattgcaagataaacaataacaaggccagcaataataccaccgataatcatccagatcttcttgtcaattgtcttctgctttttctttcttcttactttgcgtcttctaactactttcttttcagacattctaattctcaccctcgtcttttggattaatccttctttttgattcagacttcattatattacgctttttccaaaatgtacaccccaaactttcatgaaatacgcacaaattaaaccgatgttgaattgttaattcgaacgaaatcttttagaaatacttttgtaatttatttttgaaattctacaacattttaacttgcgtacacctctttcttcctatataattgcactgtaccctcagttatgaaacacaacaatatgtttcgtatctgggggtatgatacggaaaagaatgatatatgatatacaaaagagcattttatacgcactttttgtataccttattgatacaaacgaaaggagttttagatatattatgagcggttcaacatttggcactttatttcgagtcactacctggggcgagtcccacggtcccggagttggtgtagttatagatggatgccctgccggcatccctttatctgaacaggatattcaacaatttttagatcgccgcaaaccgggacagagtaaatatacaacgaagcggaatgaatctgactctgtcgagattctgtccggagtctttgaaggaactacaaccggaactcctatttctcttctcgtgcggaatcaggatcagcgttccagagattatgggaatattgcgacatcttatcgtccgggacacgcagattactgctttgatcagaaatatggtttccgtgattaccgtggcggtggacgttcttccggccgtgagacgatcggccgtgttgctgccggtgcaattgcttcaaaattacttggcgaattagggattgtgctgacaacttatgcaaaatccatcggtcctgtcactgtagatgaagctgattatgattttactgagattacaaataacagtttttatctgccgaataaagatgctgccaaaaaggctgctgaatatgtttctactcttatggagcagatggattcctgcggcggtctgattgaatgccgtgttgaccatcttccagccggtctcggtgaaccggtcttcgataaactggacgctttacttgcacaggcaatcatgtctatcggagccgtaaaaggtgtcgaaatcggcgatggctttcagagtgcctcttctaccggaagcacaaacaatgatcctttctgcatgcaacaaggacaggttatgaaaacttcgaatcattccggcggaactttgggtggcatgagtgatggttctcaattaatcttaagagctgcgatcaagccaacaccttcgatctctcagatgcagcacactgtaactaattcaggcgaagaaatcgaactgtctattcacggacgtcatgatccaatcatcgtaccgcgcgcagttgttgttgtggaagcaatgaccgcactcactctcgctgatctgctcttgcgtaatgcagtcagccggatgaatcagataaaacaattatatacggaggataaaaatgtctaataaactgatcgatatcatagatattaccaaatcctatgacgaaaatgtaattctggataaattaaatctttatatccgtgagaacgaatttctcacactccttggtcctagtggatgtggaaaaacaacactattacgtattctcggtggatttgagacaccggactccggtaatattatttttgatggaaaaaatatcaacagtcttccgccaaaccgtcgtcagctgaataccgtattccagaaatatgccctcttctctcatatgtccattgcagaaaatattgcttttggattgaggatcaaaggtaaatctaaaggctatatccgcgataaaattcattatgccttaaagcttgtcaatctggaaggatacggggatcgttctcctgactccttaagtggtggtcagcagcagcgaatcgcaatcgcacgtgcgattgtaaatgaaccaaaggttcttcttcttgatgaaccacttggtgcattggatttaaaacttcgccaggatatgcaatatgaactgatccgattaaaaaatgaacttggaattacatttgtctatgtaacgcacgatcaggaagaagctcttacaatgtctgatacgattgtcgttatgaatcagggatacatccagcagatcggcaccccggaagatatttataacgaaccgcaaaatgcattcgtagctgattttatcggagacagcaatattattgctgcaaccatgctcgaagacaaagttgtccgtatgctcggtgctgtctggaaatgtgtagacataggatttggtcataaccgtccggtcgatgctgtaattcgtccggaagatattgatcttgtcaagcctggagaaggtgttattgacggaattgtaacaaacttgatctttaagggcgttcactacgagatggaagttcttgccaacaactatgaacttctcgttcatagcacagatatgttccctgtaggaactgaagtcggaatcaaagtagatccttttgacatccagattatgaaaaaaccagaatctgaagatgaggaggcacctgctgttgaagaatagaaaattatttgccgggccttatcttttctggtccgtgtcatttattattatcccactgctcatgatcttttattatggtctgacagataaagaagggacttttacctggtctaacattgcaatgatggcttcgcctgagaatctgaaagcactcggacttgcactgttgctttccctggtcagcacactgatctgcctggttcttgcatatcctcttgcaatgattttatctgaaaaaaacatgaaccagacaagtcttatcgtactgatttttattcttcctatgtggatgaactttcttctgcgtacactcgcctggcagacactgcttgaaaaaaatggtgtgatcaacagcattcttgcattcttccatctgccacagcagtctatcatcaatacaccgggggctattgtattaggtatggtatataacttcctgccttttatggtgcttcccatttataatgtattggcaaagattgataaagatgtcatttacgcagcaagagatcttggagccaatgaatttcagacatttacacagatcatctttcctttgagcattcctggaattatcagtggtatcactatggtcttcgtacctgcgctgacgacctttgttatttccgaccttctcggtggaagcaagattcttctgattggaaacgtgatcgagcaggaattcaaacaggggagcaactggcataccggttccggtttatccctggtgctgatgatcttcatcatcgcaagtatggctgtgatcgccaaatatgataaaaacggggaggggacagcattttaatgaaaactatagcaaaaaagatctatctggcactgatctgcattattctgtatgcaccgatcgtgactttgatggtcctctcctttaacaatactaaaacacgttccaaatggggcggattcaccggaaaatggtatgtgtctcttttccaaaacaaagagattatgaatgcattgtacacaacactgatcattgcattgctctctgcactgattgcaacattgatcggtacttgtgccgcacttggcatgcaggcaatgaattcaagaatgcgtaccctttttatgggagttacaaacatccctatgctgaatgccgatatcgtaacaggagtatccctgatgcttctcttcattgcattccgcttcacacttggattcaaaacaatccttttggcacatattacattcaacataccttatgtcatcttaagtgtaatgccaaaattaaaacagacgaaccgtagaacttatgaagctgcactggaccttggagcttctccggcctacgcattcttcaaagtagtacttccagatattatgcctggaattttctccggtttcctgctttcctttacaatgtctctggatgactttgtgatcacgcatttcacaaaaggtcctggtattgatacactctcaaccaagatttacagtgaagtccgtaaaggaatcaagcctgaaatgtatgcactttcaaccattatgtttgttacagtgctgttacttttgatcctgatcaatatgtcacctgccgaaaagaaaaaagtagtaaaaataaagcgtttcggaaaagcacaaaaatttggaagatttttcttccaacgtctggtacctgttgctatggctgtgcttattatcatcggtggttttatttatggaaagaacgatgttatctcctcacaaggccaggtaattgtttataactggggtgattatattgatcctgatgttattgatatgtttgaagaagaaaccggtattgatgtagtatatgaagaatttgagacaaatgagatcatgtatccaaaaattcagtcgggagcgattgcatacgatgtcgtatgtccatctgattatatgattcagagaatgattgagaataatcttttggaagagattaattatgacaacatcccaaatttgaaatatatcgatcagaaatatatggatcttgccaaaggatttgatcctgataataaatattctgtcccttatctttgggggactgtcggaatcctttataacaagaaaatggtagatgagccaattgacagctggggtgttctgtgggatgaaaaatataaagatagcatccttatgcaggacagtgtaagagatgcctttggtgtcgctttaaaatacctgggctattcattaaattcaacagacttagatgaacttcaggctgccaaaaatctgctgattgaacagaaacctcttgtgcaggcatatgttatcgaccaggtacgtgataaaatgattggaaatgaagcagctctcggagtaatttattccggcgaagcactctactgccagcaggagaatccaaatctcgattacgtgattcctaaggaaggttctaatctttggattgactcctgggttattccaaaaaatgcagaaaataaggaacatgcagaagaattcatcaacttcctctgtagaccggatattgcaaaaatgaattttgaatacatcacttactccatccctaactctgccgggcaggcattgatcgaggatgactacatgagaaacagcacgattgcattccctgatattgatcagttgaaaaactgtgagacatttaatttcctcggagatgaaaatgaggcgctgtataacgaattgtggagagaagtgaagtcaaaataaatttgcatttagcaataagaatattggctggttcaaaatttaaatgaatgaagaagggcgtgtttggatggactcttgcaacgatatgcaggacccgttccctcagccttttgagggattgtaacaaagaagcgagatatgcaccgtgtgtggtttgtatctcgcttcttctaacaatccgcgcaaaatgtcttcgtacactcttacgccaaatgcatatcttatgcaagagtccatccaaacactcaggttcatcagatcagaaatgatttgaatacagattattcttatcgaaatgcaaatcagaagggatatgaaaagggaacgctattgactaaaatttacaaattggcacaagttgtgtcatatagtcgatagcgttcccttttttacttccgtccagaattctgtattcaagtgttgaattcgttccacagcaatcacttacgtgcaacaaatcaaaacttgtatgaagtctttcagattcgtcccgttaaggcaaacacttctgtttggaataaagaagcgaggatggtgctatattgttgaggacacatgtaaggcaggagcgttccgaatacaccttgttcagtatgttagtaagagccagacaggcaccactcacggtaactgttctggctcttacgttacatactttcaaggggatgaggtagagcgggccggtgtccgatgcaatatagcatcatccttgcggccttattcaccaccaaatcctttgcttcaatatggagaatcagacagacaaatacaaatttataccacaaaattcatcttctgatcatcgtactgcacggaaaatccttttccttcgaggtactcttctaccacctgatacatctcatcatatcgtccttcgcaggcacaattaccaagtggttcgatccagaaggattgccttccacaagtgtccctgagatgaattcggaaattcagacctttatctttaagaattccatttaattctatcacatcattaaaagatacataactcattttaattctcctcttctttacctaataaaatgtgttgcaattcgttcttctttctccggaagtccaaactgttctttacccaaggcaatactcttcataagaaatgtcatgtttctggcgaggactctcatagtctgctttccttctccatcctgctctgcttctcctgatattcttccatgaatactattccaatactgactggaagcaactggcattccagaaattgtaaagtatttgtttaactcgtcaaatgttgctgaacatccaccgcgccttgcacagacaacacttgctcctactttcatagtcttatcaaatggtgtgctgtagaacaggcggtcaagacaggcgatcaatgttgcatttgcggatgcataatagactggacttgcgataaccagtccgtctgctttctcgaatttcaaagccagttcgttaactacatcatcataaacacatttttgcttggaagcacatcctccacaggcaacacatccacggacaggtttatttccaacaactactgtctctacttctactccattttcctgaaaaatcttttccatttcttttagtcctacactagtatttccgtttgctcttggacttccattaatcataagtactcttaatttttctgccattatttctcctcctacaaacattattgtcttatcttcaaagttctcagatactctttttgttccggcgtgatccgatagctttcgattgccttctggattgtcttattatgtgtccatacgtccatcttctgttcttctagaaatggaagaacctgatcatactttttggcaagtgctgttgcgaaataccatgccctggccatatttacataatactcttctgaacggattgcggcaaccttccccggatattctaacttaaattcttcttccagataatagcgcatcagcatattgattccaaatcggatcgtatatatatgctctgattccagccatcgatctatctttttgatataagaattcagatgattcttcactgttctgacggccagaagatcacaggttgcccagttatctatatggggcagaaagcgctccagttcttctatacagagttcataatctttaatctgctcgatcagaagcccatgcagattattctcttcataatattgatgtggcaggatcttaagaaactgcttcgcctcttctgtcttcccgaatttctttgcataagttcgaagtacaggaactctcactcctatcactgattctttctctactgttggcatcagttttgcgtgaaaatcccgatattttagatcctgcattgtaaaaaggtcctgctgcacttttggtattacttcttttggagtcatctttattcacctgctttctgttaatttgcagtataacacacactttatgccactgcaagtatgtatagaacaaacgttcttctgtattttatttcttttttttgctatacttatctacgtataaagttgctgctcacacccactatgaacagtaactaaaaattctctgactcttttgctgttactgctcacactatatattaccagcaacacagattcgtcagagaatataagggagataaaaatatgctgacagtaatgaaatttggcggaagctccgtggccgatttggagcacatccgcaacgtagcaaaccgctgtatcgcaaagcagcgcgaaggcagccaggttgttgttgtcctgtctgctatgggaaagactacagataatctgatcgcaacagcaaaacagatcacagagcagccttcccgcagggaattagatatgcttcttacaaccggtgaacaggtttctgtatccttaatggcaatgactctgatttccatgggcgtcagtgcagtgtcactgaatgcatggcaggttccaatgcatacaacttcaaactatcaaaatgcacgattcaagagaattgattctgagcgtatccgtaaagagcttgatgcgaacaagatcgtcatcgtaaccggattccagggaatcaataagtatgaagatatcacaactcttggccgcggcggctctgacacaacagcggttgctcttgctgctgaactccatgccgatgtctgtgaaatttacacagatgtagacggagtatataccgccgatccacgcgttgttccaaacgctcataaaatgacggagatcacttatgatgagatgcttgagatggcctctcttggtgcgaaagtccttcacagcagatgtgtagaaattgcgaaaaaatacggtgtagaacttctggtatgttctagcttaaaccacaattcaggaacaattgtaagggagaaaacgaaaatggaaaaaatgttaatcagtggtgtggcagccgataaaaatgtagccaaaatccgtgttgccggtctcgggaacgagcctagtagcacattccgtcttttaaatcttttagataagaataaactgaacattgacgtcatgatccagtctcttggtaaagacggtacaaaatctgtatccttcactgttgcaaaatcggacatgctccgtgctttggatctgttaaatgaaaacaaagactatcttggcattaagaaactggattctgatgaaaatgttgccaaagtttctgtcattggtgccggtattcgttctcattcaggtgttgctgcaaagatgttcggtgcactcgcaagtattgatgtcaacacagagatggttactacatctgagattcgcatcactgctctgatcgatgaagcctatgcagatcttgcagtacgtaaactgcatgaaactttctttgattaaaagtaaagcagaatcaagcgacagtaaggattaataattccctgctgccgcttgatttttatcttatttttgttctgaataattacatttgttttttatttttcactgcacattatacttcttcctctaacggcgtttttccgcgcaaacgtctgtaatagaatcttccttttccaagaagaatcgtaagataacgaagtaccggctctgttgcgatcgcaaatacaacaaaaagcatgatacactttgttgtcattccgctaatcgcaaacagctgattcaaataaatactacagaataataatcctgcgatacatccgccaagaatccctgcacgaagcttattcatcggtgcactgatcttatagaggatcataaatcctacaattgccagaagcattgttgctgctgttgagatatcctgctctcctactccaaatgtctttccaaagacaaccagtgccccaaccgccaatgcatctgtaagtgctgccgggagtgctttcaggaatacattcgtcaggaaatgtcctttaatgatattcttgttcggctcaagtgcaaggaagaacgccggaatgccgattgtaaacatactgatcagtgatacctgtgatggttccagtggataagtaaacataaatactaccgagaaaagactcagcaggaaagagaatatattcttgaccaggaacaggctcgccgaacgctggatattatttactactcttcttccttctaaaacaacctgtggcatacaggaaaagtctgattccagaagtacaatctgagaagcctgtgctgccgcatcacttccggatgccattgcaatactgcagtctgcatctttcaaagcaaggacatcatttactccatctcctgtcatagcaactgttttcccagcctctttaagtgcctgaacaaactgtcgtttctggtttggagttacacgtccaaacactgtcttctcaagaatcgctttcttaatatcttcttctgtctcaagacttgatgcatccacataattctcagcatttttaatacctgctgtttttgcaactttggaaactgtaaccggattatctccggaaataactttcacttcgactccctgctctgcaaagtactggaatgtttcttttgccgcctcacggattggattcgcaagtaagatatagcccaacggtgttaccggctctgtcagtgcttttccatcaatctccgctgcataagtaccaaatacaagaacacgggcacctgtagatgcaagctctgtgattttttccttatgttgctcgtaatcatccagaagtacaaattccggcgctccaagaacatatgtcttatcttcaaatgtagcactgctgtactttgtcgcagatgaaaatcctgtcttggaaattgcttttgcgcctgaagaatgtgtaaaatattctttcattgcagccattgtgatattatcgtttgtcatagctgaaacaaaatctccgaccataagacgaagagatcccatcttttccgtatcgtactgctccgttggaataagttcctgtactttcatcgtattttctgtgatcgtaccagtcttatctacacaaagtacatcaacacgcgcaagtgtctcaatacatttcatatcatgaagcaatactttctgctgtgcaagccggattgaactgacagcaagtgcaacgcttgcaagaaggtaaagtccctccggaatcattccgatcacagccgctaccattgacgtaacacttgaatggaatgatgcattctggaataccagagactgtgcaacgagtatgattccaatcggaatgattgccacaccgacgcatttaaccaatttatccagcgagcggatcatctctgactgctcaccattctgcatttcttttgcttccagtgtaagctttgaaatataagaatcttcaccaactttatcaagtcttgcatgacattgaccggaaataataaaacttcctgacatcagctgatctccggcatgttttgtaatctcatcagactcgcctgtcagcagagattcattcacctgtacttcacctgcacaaacctgtgcatctgcacatacctgcgcgccggctttaaatatgacaatatcatcaactaccaactcttctgcatcaatcaacgattttttaccatctcgcactacagtcgctttcggtgcatttagcatggtcagattatccagcacttttttggcacgcacttcctgtataataccgatcaacgtatttgcaataataaccggaagaaaggtcagatcccggaaggatccaaccagacataacaaaatagccagaacaagaaagattaagttaaagtaagtaaatacattctcatgtacaatctctttcgttgtcttcgacggaggatcgacggccctgtttacccagccatgaagtctgtgttcctgcacctgctgtgctgtcaatccgactttataatccggattgtaacgggttgtcggtatccgcttctctatttcttcttcaatctctgttttcttgtttctgcttcttgccatctgttacttcccttctgcttcttccaacgtctccgttctcgtcaaaatctgcataaattcttctcctgtaattgtttctttctcatacaggtattttgcaagctcatgaagtttcttctggtttttctccaaaagttccatcgctgtatcatatccgtgttttacggtatctacaaccatctgatcaatatctgctgctgtctgtggggaacaacttaaactgctgtctcctcccagatatggattgttctgcgtctcaagagcaaccataccaaaccggtcactcattccataacgcgtgatcattgctcttgcaagctttgttgcctgctcgatatcattcgatgcgcctgttgtgatagaattaaaaatcagtttttctgcgcatcttcctccggtcagtgtcgcgatcttgttgatcagctcttcctgtgtcatcagattccgttcttctgattcaacctgcattgtatatcccaaggcacctgatgtacgcggaatgatcgtgatctttgtaaccggtgctgaattcgtctgtaatgctgctaccaacgcatgaccgatttcatgataagaaacaattaatttttccttggaagaaagtacctgattcttcttctgatatccagcgataacagtttcaatactttcttcaagatctgcctgcgttacatatttacgattctctctgactgcgcgcagtgccgcttcatttaccatatttgcaagctctgctcctgatgctcctgatgcagctcttgcgattgcattaaagtcaatgtcatctccaagtcttactttcttcgcgtgaactttcagaatctcttcacgccctttaagatccggaagttccaccggaatacggcggtcaaatcttcccggacggagaagtgccggatcaaggctgtccggtcggttcgtcgcagcaaggatcacaacacccttagatgcatcgaatccatccatctctgtcagcaactggttcaatgtctgctcacgctcatcatttccaccatatcctgcattatctctctttttaccgattgtatcaatctcatcaataaatacaatacaaggtgctttttcattcgcctgtttgaaaagatcacgtactttagaagctcccatgccaacaaacatctctacaaattctgaaccagagattgagaaaaatggtacatttgcctctcctgcaactgcttttgcaagcaaagttttaccggttcccggaggtcctacaagaagtgctcctttcggacatactgcaccgatctccgtatatttctgcgggttatgaagaaaatccacaatctctgtcagcagttccttcgcttcatcttctccggctacatcctggaaagtgattcctgttgtagattccacataaaccttcgcattgctctttccgaactgcatgaacggatttcctgctgcacctccacccatcttggccatcatcttctttgcaagccactgtcctaatgcccagaagatcaaaagtggtaaaatccatacaaggaaaaagctaagaagcggattcatctcctgctgtgcgactcttccgaattcacatcccgcatcttccagacgatttaccagatttggatcatcaaacgttgttgtctcataatatttcggttcctcgctattatctgtaaaataaatagtgtctccattcaactctacttttgatacttcttttccctcgaccatagtaagaaaggttccataatcgacttctttcaccttattctttcctagaatattcggaaaaagaaatgtgttaagaagcacgagaataatcaaagcaatcaaatagtaaaagattaatggcttctttggtttctcgactttcttcatactgttgttcctcctattttctaaattttgcacgaactgcctttatcatctgtataatcggaagattcaatgctgcaagaccatacacagtaagtaactgcgataatgtcagtgtctgcactttaaagatgttatgcagtccaggaacagtcacaacaagcgtgatcagaatcattccaattacaaaagcaccgatcaggtaaatgttattaaagactctttttgtaaatacaaccggacgatttgatttacagttaaacccatggaacaatcttgaacagcaaagtgttgcaaatgccattgtacttgcaagtagtgcattaccgtctttgtatccaattgtaaatgcaatcatgaccatggtacagattgataatccttccagtccgatattgatcaaaaagtctttcgttaaaatggattcatttatcggtcgtggcttttctttcatcacatttttcgaatgtggttccaatccaagagcaattgccggaagactgtctgtcagcagattaatgaacaacagatgaaccggtgcgaacggtaccggaagtgccatcagtgaagcataaagcactgccaggattgctccaaaatttcccgaaagcagaaactgaatggatgctttaatattgcgatatatatttcttccattctctactgctttaataatagtcgcaaaattgtcatctgtcaaaaccattgctgcagcgtcttttgacacttcgcttccggtaattcccatcgccactcctatgtctgcctgtttcagtgccggagcgtcattcacaccatctcctgtcatggatacaatgtttcctttctcctgccatgcacgcacgatacggatcttgtgttcaggagaaactctggcgtaaacagaaatcccttccacaaagtctttcagttcttcatcggacattttgtcaatctctgcaccctcacaggcttcggattcattttcaagaattccaattctctttgcaatggcagcagctgtcaccttatgatctcctgtaatcataatcggacggattcctgcacatttacactcttctacagcagcttttgactcttctctcggcggatccatcattgcgatcagccccaggaatatcagatgatcttcatcctccagcgtaagttccgtctcatctgatacttctttataagcaaatgcaagaactcgtaatccctctcttgagtatttctgattctgctcttcgattactcttcttgtctcttctgtgatctcatgagtctcccctttcatctcaacccagtctgtccggttcaaaagaacatcaactgctcctttgacaatcatcgttggcactccgtttaatgaatgctttgttgccatcatcttacggtcgctatcgaatggattctcactttctcttggatactttactctgacttcttccgggtcaagaccaagactgcttcctaaattaatcagtgctgtctctgtcggatctccgatctctacaccatcaatattcgtagagtcattacaaagaatactgctgataaggagtctgctctgagacggatcccggagatcgatcttgtctgcggaaatgctctggccatctacataataatgctctactgtcatcttattctgtgtcagggttcctgttttatctgaacagataatggatacacttcccagtccttctactgcctgtagttttcgaacaattgcatgctctttcgccattttctgcgttccaaaagaaagaacaatcgtaacgattgaacttaacgcctccggaattgctgcaacggcaagagcaactgcaaaaagaaatgcatttccaatattctcaccacggaaaacactgattccaaacaaaatcgcacagaatacaagaattaaaatggataatttctgtccaaactgatccaggttcacctgcaatggagtcttcttctcagatgtcgtcttcagaagacttgcaattttaccaacttctgtattcattccaatctctgtaactacaaaagaacctcttccatacgtgagaaagcttccggaatataccatattaatacggtctccaagaggaacttcgtcctgttcaatcacatctgtcgtcttctcgacaccaagactctctcccgtcaatgcactttcgtcaaccttcatgcttgcacattccagaatacgtccatctgcaggaatatagtctcccgcctctaacataataatgtctccaacagtaacttctgaagacggaatcgggacaaccactccatcacgaagaacttttgcttccggaccggataatttcttcagacttgccaaagatgactctgcctttactgtctgcacagttcccagaattgcattcattgtgatcacgataacaataacagctgcgctctcaatatctcccataaatcctgatgcgatcgctgctataataaggatgatcaccagaaaatccttatattgctccaaaaaaatctgaaatgttgtcttcttttttccttcagtcagttcattcgggccgtatttcctttgattttcactgatctgttcttttgttaatggttcttccgagccattcacttctcttaaaacttcttctcccgataattgataatatgctttcactgccattcctcctaactggttattgttcactcttcttttgtgacccataatcctgattaatctgcagtgcgaataaaaaaagagacaattattgcaccgcttcttacatgcaataaaagtctcactatttcatcacgatccggatggacttcttccatcgtattgacggatcgcaaacgctactcaaagcgccagttactcccttttactaaaataaactatactcatttttcctgataatgtcaataaactttattttctttttaggaaatattttcaggattttaatactaaaagatcgcggagcgttttttgcatattaggaaagcactttcctaatatataaaaagaataccttacagacattctatccataaggtatcctttctattctatcaatcgatcaatgaaaatctcaatctattttcttaaatcctaaacgattccctgagctgtcatagcatctacaaccttctcaaatccggcaatgttagcacctacaacgtagttgcccttgaatccgtatctctcagctgcatcaaccatgttgtggcagatgttaaccatgatgtttttaagtttagcatctacttcttcgaatgtccagctcagacgctcgctgttctgagacatctcaagtgcagatgtagcaacaccaccggcgttagctgctttaccaggtgcaaagataacaccattctcctgcagatactctgtagcttcgagagttgtaggcatgttagcaccttcacatactgcgatacatccgtttgcaacaagtgcttttgcatcttcaaggtgaagctcattctgtgtagcacatggaagagcgatgtcaactttaacattccatactcctcttccttcatggtactctgaatttggacgatagttcttgtactctgtaagtcttgcacgtttcacttctttgatctctttgagagctgcaacatcaattccatccggatcgtatacccatcctgtagaatcacttactgtaacaaccttagctccgagttcctgtgctttctcagttgcgtaaattgcaacgttacctgaaccagaaactgcaactgtcttacctgcaagctcaataccattgagtttcagaagttcgtctgtcagatacagaagaccatatcctgtagcttctgtacgagcaagagatccaccataggaaagtccttttcctgtaagaactccttcatatagtccacggattctcttgtactgtccgaacatatatccgatctctcttgcgcctgtaccaatatctcctgctggaacatcagtatcagcaccaatatatttgcaaagttctgtcataaagctttggcagaatgccataacttctctgtcagattttcccttaggatcgaaatcagatccacctttacctccaccgattggaagtcctgtaagggagtttttgaaaatctgctcaaaaccgaggaatttgataataccaaggtttacagatggatgaagacgaagacctcccttgtatggtccgatcgcactgctgaactgtacacggtatcctgtgttaacctgtacctgacccttgtcatctacccacggtacacggaacttaatctgtctctcaggctctaccagtctctcaagaagagcttctttacggaatttttcttcatttgcttcaatcacaacacgaagagactccagtacctcttttactgcctgatggaattccggctcagcaggattcttctttacaactaaatcaatcacttcatcaacgtatgacatcttaattacctcctagaataaatagattgggatttctatctccctgatactattgtatctttcgtcaactaatgtcttttctaaaacaagaaaaacagactgacaagcaatctgttaccccagacaccgttgtctactcgtttattttataagctaaatgaaagattgtcaatcattaattgcattattttaaagttttatcactttaagttgataaaactgcatgaactaatgtatcaaattgcaattttcagcatatttaaggttatatgtcgagtaaacagatagggaaatggtggttattcataagataacctgcatttttagccgcagtgcgcatcctaagcggagcgttttttatatgttaggaaagaactttcctaacatataaaaaacagagtactgtttccagtactctgtccatttgcacatattagttatatttacgttttctagcagcttcagatttctttttacgtctaacgcttggtttctcgtagtgctctctcttacgaatctcctgctgaataccagcctttgcacagtttctcttgaatctgcgtaaggcgctatctaacgtttcgttttctttaacgattacatttgacatagtctcacacctaacctcccctccagccttgtattgtgcatcatacgactgttcgggtatatttattgcactggatattattataacatattttttcaaaacgtcaactgctttttatgatttttaccgatttttttatacttttttctcgcttctacccaaaagagaatctgccacagacagattctctttacaatgactttatttaatctgatcagccagtgcttcttctgcttttgcaagtgcatccgggattcctgctgggttctttccacctgcctgagccatgttcggacgaccaccgccgcctccgccaacaagacctgcgattgctttcacaagatttccggcatgtgctccctgcttcattgctccgtctgttgctgtagccatcaggcttacttttccgtcatttcctgatgcaagtacaaccacaccttcgccaagcttctctttgagctggtctccaaggtcacgaagtccattcatatccacaccgtcaagctgtgctgcaagaagcttcacaccttttacttctttcacctggtcaaggatgtctcctgctgcgctctgagccatcttgctcttaagactctcaacttctcccttcagagacttgttctctgcctgaagatgtgtgatcttctctgcaagattctccggagttgcttttacaagctgtgctgcttctttgagaagacgctccatctcagcatagtagttcataagtccttcagatgtcagggcttcaatacgacgaacacctgctgctacaccactctcagaaataatcttcagtgctgtgatctctgatgtattcttaacatgtgtaccaccacagaattcaacggagaatccgctcatatctacgacacgtacaacatcaccgtatttctcaccaaacagagcctgtgctcctgtctttcttgcttcctcgattggaaggttctttgtcacaactgcgagggcatttgtgatctgctcattcacaatttcttcaaccttcttcagttcctcaggtgttactgctgagaaatgtgtaaagtcgaaacgaagtctgtctgcatttacaaaagatcctgcctgctctacatggcttccaagtactgtacgaagtgctttctgaagcagatgtgttgcactgtggtttctttctgtaagtgcacggttctttgcgtcaacttcaagagttaccgcatcaccaatcttgatcattccttttacaacatgtcctacatgtccaacctttgttcctgcaaggtgaatacaatcttctacaacaaactctccatcggctgtacgaatcacacctttatcagcttcctgtccacccattgttgcatagaatggagtctgctcaacgatgattgttcccttttctccatcagaaagtgcatcaacaacttctgtctctgttgtaagagctgtaaccttagaatcaaatgtcagattatcatatccgacaaattctgtctcaagtgctgcatccagctgatcgtatacagaaacttcttttcctgtataagaatgagttccgaatgttccttctgatttcgcacgctgttcttcctgtgctttcttgaatccttcctcgtcataagtcagccccttttcttccaggatctcacttgtcagatcgattgggaatccataagtatcataaagcttaaatgcattctctccggaaagaactttctctccattcttctccatctcagcttccatatctgcaaggattgcaagtccctgatcgattgtcttattgaagttcgcttcttctttcgcaattacattaaagataaactctttcttctcttccagctccggatatccatccttggaaccttcaattacagttgttgcaagctttacaaggaatgctccgtcaattccgagcagctttccgtgacggcatgcacgtcttaacagacggcggagaacatatccacgaccgctgttagaaggtaagataccatcagaaaccataaatgttacggaacgaatatggtctgtaacaacacgcagagaaacatctgtctcatgatctattccgtactgcttgccggagaggttacatacatgatctctcagtgctttcattgtatcaatatcaaacatggaatctacatcctgtacgatacaggcaagacgctcaagtcccatacctgtatcaatgttcttctgaatcaggtctgtatagttgccgtgtccgtcattgttgaactggctgaatacgttattccagatctccatgtaacggtcacactcacatcctactgtacatcccggttttccacatccgtatttttctccacggtcatagtaaatctcagaacacggaccacatggacctgaaccgtgctcccagaagttatcttccttgccaaaacggaagatacgctctgccggaattcccatcttcttattccagatttcgaacgcttcatcatcatcttcatatactgaaggatataatctgttcggatcaagtcccacaacttctgtaaggaactcccaggaccactcgattgcttcattcttgaaataatctccaaaagagaagtttccaagcatctcaaagaatgtaccgtgacgtgctgtcttaccgacattctcgatatctcctgtacgaatacatttctgacatgttgtcactcttcttctcggcgggatctcctgtcctgtgaaatatggtttcagcggagccattcctgaattaatcaggagaagactcttatcattatgtggtactaaagaaaagctcttcattgcaagatgtcccttgctctcaaagaactccaaaaacatttttcttaattggtttactccgtatggctgcatacatccatcctcctctttcgctcataaaaagcctattttgtaatataccacaacagcctccgtttgtaaagcggaggccggttattatccttatatttacttatttcagttcaatttcttccagttctttcggtggaagtgccctacttgagtttttgacataagctgcgacatccttcttcgcagtcgggattggaatattcgttccagctcctgcaacacatccgccaggacatcccataccctcgatcagacatccgttcattcttccggctttggcaagtgtcaggatcttcttacattctgccagaccttccgcatgctcaatattaacctgcgttccagggtaatactcgttaatacattcttcgattgcctttgcaactcctcctgcacaggcgtatccacgtccggctcctgtcgcatcatggaaagaagactctgcctcataagctgtcagatcaattcccttcgcatcaaacattgcctgcaattcttcaaatgtaacaacgaaatccacatcacttctcacagtacgtctggaagcttccagcttctttgctgcacaaggtccgataaatacaacctttgcattcggatgttcctgtttgattgttcgtgctgttgcaaccatcggagtcagttcctgtgagatctgatcgatcagatccgggaagaacttcttcgcaagcattgcccaggatggacaacaggatgtcagaagaaatggaagttctccggttgtcactttattcacataatgatgtgcttccgcaattgctccgatatccgctccaagagcaacctcatatgtctctgaaaatccgagttcttcaagagctgctttgaagtttcttacattaatattcggtccaaactgaccaacaaatgccggtgctacctcagccacaatctcttctccttctgaaagtgcacgagccagctggaagatctgagacttgtcagagatcgcaccaaacgggcagcttaccatacacattccgcaggaaacacatttgtcagcatcaatataagcacgtcctaatttatccgatgtaattgcattcactccacaagctttcttgcaaggacgctccttcttggcaatcgcatcgtatggacagacagacttgcactttccacacttgatacatttatcctgatcgataaaggattttccattcaccatggaaatagcgcccctcggacagacttcctgacaaggatgtgcaaggcagcccttacatacattgctgacctcgtatttattctcctcacagctctcgcagcctgacggaatcacctgcatcagcggcggctcataatatttttcagaaatattactggcctcaactcccgctgtcaaatggaccggcttattctccggacgaagggaaagtcccatcgcaagacggagtctttctcttacgactgctcttgcacgataaatgctctcacggtattttacttctgaatcttctcctacgatttcatatggaattgcttccatatctgctaccaatgtctctgcatttgctttaaatccaagcttggcaacttctgtaaatacctgtcttcgaattgcacgaaccggtgtctgtaatcctctcatttttgatctcctcctattcttcagttccaaaaactctctgtgcataatgaaccgactgcatggcatctttgccatagaaatcagctcctatcatatctgcgtagtcctgattcagtacagcgcctcctaccatcacaagacaatgcggagctttctctctaagctgtctgatcgtctcttccatacttacgacagttgttgtcatcaaagcacttaatcctaccagatgaatatcttgttcaagtactgtgtcaacaattgtctccggcggaacatcctttccaagatcgatcacatcaaagctatagttttcaagcagaaccttcacgatatttttaccgatatcatggatatccccttttactgtagcaagaatgatctttcctttcttctcctgaacttctccgctgctatccattttctctttaagcaccgcaaatgctgtcttggccgcttcagcactcatcagtagctgaggcaaaaagactgttcccttctcaaatccttcacctaccgtattcagtgccgggatcagctcttcgttaatgatctccagaccatctttctcctgaatcatctcagatgtaatgctgttcgcctcttcacgaagccctctttcaattgcacttttcagtgtcatcttgtgagctgaacctgttgcggaaaccggagctgttcccggctgctgtgcatatttattaatataattctcacagttgctgtccagattcattaacgcatggtatgcataccatgccttcatcatatcctccgagttcggattgataattccaacgctcaaaccattctgcattgccatcgtataaaagatggagtttacaatcggtctgcttgggagaccgaaagaaatatttgatacaccaagcacagtacacacaccaacttcgtcacgaagtctgcgaagtgtctcaagtgtcacctttgctccttccggttctgaactgatcgtcattgccagggcatcaattacaatatctttcttctcgataccgtattttgctgcctctgcgataatcttcttcgcaatctgtacacgtccctcggctgttgccgggattccgtcttcatcaagtgccaggccgatcacaacaccgccatacttccggatcagtgggaatactgcatccattgactcctgctttccactgactgaattgaccatcgccttaccattgtaaatgcgaagtgcattctccatcgcaaccgtatcaaccgtatcaatctgaagcggaagattcgtcacactctgaagttcctgaacaacttccttcatcaatgtcggctcgtcaatatccggaagtcctacgttaacatccagaatatgtgcaccgttatcctgctgtgcaattccttcttttaaaatataatcaagatcatgttccttaagcgcctgtttaaagcgtttctttccggttggattaatacgctcaccaataatctttgatccggttccaaggaacacactctgtccataagaagatactacagtataacttttcttctcaatcggcttcaccggaatgtctttacactgcttcaccatctctgcaatatgtgcaggagttgttccgcagcatcccccgatcacaactgccccaagatcaacaacatgacgcataacagaagcaaattcttccggagaaacatcgtaataagtttctccgtctttctgcttaggaagacctgcattcggtttgacgatcacaggcacagaggagtacttcatgatctgctccaggatcggcagcatctgctccggtcccattccacagttgattccaagagcatcaatccttaatccttcaagcattgccacaacagacggaacatctgctccggtcagaagctttccacgctcgtcaaaaatcgtcgtagcgaaaaccggaagagatgtattctctttcgccgcaagtactgctgccttcagttcataagtgtcactcatggtctcaatatggatcagatccgcaccggctttctctccgaggatcataacttctttgaatgtctcatatgctgtctcgaagtccagatcacccatcggttttaaaagctttcctgtcggtccgacatccagtgctgtgtagattcttcttccaccacttgcctcttcagccgcatccttcacatgcctgatcgcaagacggataatttcttccaatggaaaatcatcgcaatggaatttcaatgcattcgctccaaatgtgtttgcaagtacaatatcacttcctgctgaaatatattgtttgtgaatgtttttgatctcatccgcatgtgtaacgttccacgtctccggtaactctcccggctgaagtccctttgcctgaagcaaggttcccattccgccgtcaaaatataataactcttttcccaggcgttctcgtatcatcttcttgtatcaatccttcctctcttaactcttgcttatcgtcggtattcacaatctttttttgtacagacctcacatcctgagattggacatctgtccttctgtgtactgattccaattactgctgttaccgactttgttggtgtcatcataaagctgtctgtcaaagtcaacccgattgtctttgcacaattcaacattcgtacgactggttcctgataacagatatcaaaatctccatatccgggactgaatctcggtcttaaatacaaatgttcttcttcaagctctgccgcaatcttcttctgacactcatcacaatattcttctaacattgctgctgcacaagactgcaaaataactgctcttgccatatctgtcaaagaaatcctgcgcatcagccggtcaactccggcgccaagtgttgctccaaaaagaacaacctgacggcatcctttcagatttctactcaggctcttacttcgaatctccatctgtccaataaccagtcttccgtcatctgtatgattcagatcaaaaatttggcagatggacttaggccctgcttcctgttccaggtctttgaaagactgttggatcagttccaaggttcgttcatctgcctcattttttccaaatcccagataacgaactgcttcacgtactctcttctctgtctctatcatctggtcattcactttcttaacacttgataatctcggaaagattattcataatcgcaattgcgatctctggcttattcatagaataaatatgaatattattcacaccgttcgcaagaaggtcaataatctgatctgtcgcataagcaattcccgcctgcttcatcgcctccggagaacttccgaagcgatctaatattgcaagaaatcttctcggaaatactgttccggaaagttcctggcttcgcttcatctgagcagcactggtaatcggcatgattcccggcagaaccggaactgtgattcctgcttctctgattctgtacaggaaattataatggatatcattatcaaagaacatctgtgttgtaaggaaatcaactccactgtctaccttctgtttcagataacggatatcatcctctttatgttcctgctccacatgtccttccggataacatgctgcaccaatacagaaatccccatgtttcttgatttcctgtaccagttcataagcataatggaatcgatctccatcagggaatgtcatgccttccggaatatctcctcgtaaagcgagaatattctcgattccatgagccttcaggttttcaatcacctctccaacttcttcttttgtggatgaagcacatgtcagatgtgcaagactcatcactccaagatcgtccttaatatgggatgcgatcttcgctgtgttcttgcttgttccgccaccggctccataggttacgctgatataagatgggttcagtttggcaatctcatctgttgctgataatactttgtcaaatcctgcatctgtcttcggcggaaacacctcaaaagaaatgtggatgcctttctggttcagtttgtcaataattttcatcgggtctgttactccttgctcttgtgttactcttgtattacttctttgttacttcttataattcttattctccgatcagacttctgtacagatcttcatactgtcttgcagaattcatccatgagaaatcctgagtcatcgcgcgctcgatcatcttgttccagtcacgtttcttatcataatagattctttctgcataacgtacagtgttcaacatctcatgtgcattataattagagaaactgaatcctgtacctgtcttctcaaactcattgtacggttctacagtatctttcaatcctcctgtctcacgaacgatcggaagtgttccgtatctcagactcatcagctggctgagtccgcatggctcgaataaggatggcataaggaatgcatcacatccggcataaagtctgtgagaaagatcatcggaatagaaaatattcgctgaaacctttcctgcatacttccatgcaaagtgacggaacatattctcatatttcggatctcctgttccaagtactgcaatctgcactgcatcctgacacatctcatccatcatataatcgatcagatcaaatcctttctggtctgtcagacgggaaacgattccgatcaacattacatgattgtctttatccagtccaagttcttcctgaagagcggccttattcaccggtttgtttttccggaaattctcaacattaaatgtctttgcgattctatgatctgtatccggattccagtcattgtaatccagaccattcacaataccgcaaagatcatttgatcttgctgccatcagtccgtcaagaccttctccatagaacggtgtcttgatctcttctgcatagctgtggcttactgttgtcaccttatctgcataaacaataccgcctttgagcatattagcatctttgtatgcctcaagcttatccggaacgaaataataatccggaagtcctgtaattccctgtacagtctttgtatcccataccccctggaacttcaggttatgtattgtcataactgtcttgattcctctgtaatattctccaaagaagcggaaattatccagatataccggaatcagacctgtctgccagtcatgacagtgaatcagatccggacggaacccaatgaccggaagaatacttaaaactgccttacagaagaaagagaatttttcaatattccacttcggatctccatcatatggagcaaatcctgaaaaataaaattcattatcaatgaaataaaatgtaactccatttaattctgtcttaaagattccgacatagcgattctctcctgcaaaatccatgtagaagtttgtgatatactccaagcgctctacccactcctgtttcatacacatgtacttaggtaaaactacacggcagtcatatttctctttatcaaaatcttttggaagtgaacctacaacgtcagcaagacccccggtctttataaatggtacacattctgatgaagcgaacaaaatgtttttcatacttagatcctccactttcacttgccctctttcggcaattacttataaaatattataccgcatttttatcataatgcaaaggatttctcattgtattttacttcttattttccatgcctgtattccaattgtattgtatctgcgatcaaagcaataaattcagaatttgtcggtttcccttttccattgcttactgtatacccaaaaagttcatccagagtgtccagctttcctctgctccatgccacttcaatcgcatgtcggatcgcacgttctactctgcttgatgttgtctgatacttctttgcaacggttggatacaggatctttgtgattgcattgagcacatccatatcatctaccgccatcataatcgcatctctcagataatgataccccttaatatgagccggtattccgatctcatgcagcatatttgtcactcgtgtctccagactttctcctctgttatcagatgccgcctcagagcttcttgtttccataccgtgtgacatccgccccgcacttcggattcgttctaacaacatctcattttgaaacggtttcatcatatagtaatttgcacctttattaaaagcatcttctgtaatcttttcttgcccaactgctgtgattacgataaaatacggatgcttgctgacagttttgtcatgattgatccgatccatgaccgtcaatccatccattttcggcataatcaggtcgagaagaacaacatccggctgtttatctttgatgatctgacacatctcttcaccatttttcgcctttccgaccagattcatgtctttttccatcccgatcacacgatccaaaagatccaaaattttctggttatcatcagcaatggctattttcaaatgttccatcttcttctctcctttttctgagaacgtttgtcttgttacaccactcgtgtattatattccagcttttttgtcgtattcaagaaaatcttgcagtagtatttcgacatccttttcgacccttttcacgattcttcctctttcaacatattttcaataaaaataccgtatccttttgtcgaatcctgtacaaacacatgtgtcacagctccgatcagttttccattctgaatgatgggactcccgctcattccctgaataatgccccctgtcttttccagcaattccgtatctgtcacctgaattaccattcctttgtttacctggtcggattctttgtcaatttgtgttatacagattgtgtattctttcacctcaccatcaatgtagcagcgaatccttgcctctcctgtctttatttcctctttttttgctacctgtatcggaacttcctctcctatccagcttctgtctgaatttaattctccataaatacccgcatccgtatttttctcaatcactccaagctgatgaaaccgattataaacaataatcccttccattgttccgggattccctttgcttcccttttgcactttctgaatactggttctataaagcgttcctcttttgatcgtaagaagtgtacttgtatcaatatcatgaataccatgtcccagtgctgcgaacctgttattttttgtcaaaaatgtgatcgtcccaagtccctgtacattatctcttacccagattccaaggcgataatttccttttgaaatctgcacaggagtcaatttcttttctaatatcgtattttcacgtctgactgtcagaaggaccttctctccatccagatgttccaccagatccatcaactgttttttcccctcaatcttctggtgattcacttccgtaatataatcaccggaactcactacaccctgtgcaggtgtatattccttcctatccatccccgtcattttctccgtgtctaaaaccagtacaccatccgtttccatataaattccaaccggcattcctccaagcagaaccgtatcgtcttccttttccgcagccagactttccacttcccgaccactgacttccgtattttccataaatcctgtaatctgtgcacagccacataacatcaataagcagaacataaacaacagacctgtcctgctcatattccttttcctgcgttctttcatgatccacactcctctcttgcaaatattaaaagcagatgctgtttgcatctgctcttagtatgtgtggatcttcttcttttcacactggtattatttttctctttttgccagttccttcatttctctggcactgtctatgattccatctgttacatttgctccaccaagtagccttgcaagctctgcaacagagtcttcctgatcaagtctctcgatctgtgttctcacagaattatcttctgcctctttatgaatacaaaaatgaacatctgctgctgctgcgatctgtgaaagatgtgtaatacaaattacctgacggctctttccgatcaactgcagtctctctccgacacgacctgctgtgattcctgatattccactatcaatctcatcaaatatcaaagtcggtgtatcttcttcatctgcaagtacggtcttgattgcaagcataatacgggatagctctcctccggatgctacatcccccagtggacgcacaggttctcccggattaaccgacagataaaactctgcatcatcttttccttgtgcagaataactttttgcttctgtcaaacgaatttcaaaacgtgcatccaggaaattcagttccgacatctgatgaacaatttcctcggcaaatttaactgcgttttgttcacgcacttcatgcagttccatcgcagccttttccatctgcttttctgcttttttctgtttctccaaaagttcctgcataaaagaatcgtaatcttccagttccgatagtctctgtcttttttccttacaatatgcaaggatatcactgacagtgtttccatattttgcctttaaatgattcacttcattcaggcgggactcaacttctgaaaactcttcttccgaatattcaaaactctttgcatattctgccagatcccggttgaaatcattcagcagactatcgatctccacgatctgatcataaagctggcttcccttttcatcaaaagatgctgcttcctgaaggcttcggattgcacggcttaagtaatcacttgcatttccacgttcgtcctctgcagtatactgatacgcttctgcaactccttctgtgagttttctgctatctgtcatcttgcgatactgttcttctaaaagttcatcttcaccttctttaagagctgcttcttcaatctcattcacttcaaattcagcaagagaaagttctcttcttcggctctcttcatccagcgaagattgttccaccttcttacatactttcttccattcctgatagcaggaagccattttttcttttaacggatccgtctgttccttcccataaagatcaagcagtgttaaatgattctttcgatgaagcaatgtctgattatcatgctgtccatgaatatcgatcaaaagactggctacatctttaaggacgctcatgttcactgtctcaccattaatcttactgacacttcggccttctaaaaggcggcggctcaatgtcagatatccgtcttccggataaatgtccaaggcctccagcttctttaaaatcttttcttctttgatgtgaaaagtaagttctaccaatccactttttgccccgtttcgaagcatctgtgcattgtattttccacccagtgcaagcgtaacagagccaagaaggattgactttcctgctccggtttcaccggtcagaatattcaatccttccccaaactctacttctgtttcatcaatcaaagcaagatttttcacatacagattctgtaacatatatcacctatgctttccttgaaaccaatttccttatattctccattactacagctgtatcttcaactgtacgaattgcgcacatgatcgtgtcatctcccgcaatacatccgaccacttcattccatttcattgcatctactgcagcagcaaccgccattgccattccggcaactgttttgatcacaaggatattctgtgccatatccatggaaacaaatccgtcacgaagcacacggatatatttttcgttcattccgtcatcttcctgtctatggacaatatacttctgacgcccaccgtttacagacaactttgtcagcttcagatctctgatatctctggagacagttgcctgtgtgaccttgaagccggcattattcagatattctgccagttcctcctgcgtctctatgtcatactgactgatcaattcaattatctttgcatgtcggctcactttcatagtatcaatttcctttcatcttctcgcgcattgttatcataaaactttcttcacttaattttacaagatgcgctttggcatctgattttctgatcttcactctgtctccgctaaccaattgtctctgtacagcaccgtcataacataaagctactttctcctgccttccataacggccctcgcaaatctcaacttcaacatcatcctctgctgaaagcaccacactgctcgtgttaagtgcatgggaacagattggagtgataactatcagacttgctgttggctctaccaccggcccacctgcggaaagattatatcctgtacttcccgtcggtgtacagatgatcacaccgtctgcctgatatgtgttcaacaatgtcccattcacatatacattaaactgaacaatacgaagattcccttctcttgtcaggacgatatcatttaccgccagatctttttcaccggatgacattgtcccctccaacatcatacgtttctcaactttaggctcttcctcgcaaagtctgtcaatcgcagatttataatctttcaattctacatctgccaaataccccaacgttccgatattgattccaagaagcggaagtttatttccttcaaggtcacgtattgcacggatcagagttccatccccacctaaaaccagtccgcaatcaacgttctctggaatcgttcccggaacaataaatccttcctcgtccttttgcgcaagaataacacgtttgccttttctctcaatataatcttttatctcaatcgtaacagaataatctctgtcttttaattgatttgttatgatataaaaagattccataccatcacctttttactttgccagagcagcgaatgcttcatccactacctgatccagttcctttgtctcaatctttgcttcctcttccggacatttcttcaaatgtacaaggtattcgatatttccttctggtcccttgattggagagaatgtgatctcaagtacagaaaatccgattgataccgcaaattctgtcactttctcgattacttcatgatgtgtactcttttctcgcacaacacctttctttccaaccttctcacgtcctgcttcaaactgtggtttgatcaatgctacgatctctccatcatctgtcagatacgctctgattgcaccaagcacttttgtgagagagataaacgaaacatcaatcgacgaaaaatcaacaggttctccaagatcttccggagtcacataacggatattcgtcttctccatacataccactctcggatcctgacgcagcttccaatccagctgtcctcttcccacatcgatggcaaatactttctttgctccattctgaagcatacagtctgtgaatccgccagtggaagatccaacatctgtacagacctttccatctactgtcacatggaattctttcattgctttctcaagcttaagacctccacggctcacataggggagaacatgtccgcgtacctcaatatttacctcctctggaaatgttgttccggccttatcttctctctgaccttctacaaatacatttcctgacataataattgcttttgctttttctctggaatccgccagatttctctttacaagcaatacatccaaacgttctttcatgttacttttcttcctttattctctgatcatctgcaatgaccttttttacaatactctctctgtcgagaccaacttcttttcttaagacatctacatttccatgttcaacataatcatctgaaataccgattgtgcaaactttcaatgggataccctcgcgcatcacaaaatcttctacctgctcaccaaatccacctgtaagcacattttcctcaattgtcacaaggatcctgtgatttcctgaaatcttccggatcctctctgtatccagaggtttcacaaatcttgcattgatcagactacactgataccctgctgccttaagatcctcacgcacctgttctgcaaggaaagacatatgtccgacaaacattaccgcgatctcactctcttcatatagaagttcgctctttccatattcgatcggagcacggaattccttcagtccttcatatgcttctcctcttggataacgaagtgcaatcggatactggaaacctactgcaaagcgcaccatatccgccatctcccaacggttctttggtgacaggattgaaagattcgggatcaatgataaaaatgataaatcaaagactccctgatgtgtctctccgtcacttccaacaagacctgcgcggtctactgcgatcacaaccggcagattctgaagacagacatcatgaatcgtctggtcaaacgctctctgtaagaaagatgaatacaccgcaaaaacaggcttcattcccccagcagcaagtcctgctgcaaatgtcatcgcatgctcttctgcaattcctacatcaaagaatctttccggaaatagctttgcgaatctggaaagtccggttccgtctgccatcgctgcagtaatagctacaaccttcttgtccttctttccgatatctgcaagcactttggaaaaaatatctgtataagaatccttccccgaccctccgatcgtttctcctgttgtcacatcaaaaggtcccgttccatggaattttgacggattcgtctctgccggaagataaccttttcccttcttcgtcacaacatgtacaagaactgcatgatttacccgttttgcttcattcaatgtctttattaatgtcttcagatcatgtccgtctacaggacccagatatgtgattcccatatcctcaaaaaacattcccggaacaaataattgtttgatcccgctcttcgtcttcttcacctgatggacgatccgttctcccctgccgggaatcctcttgatcgtatcttcgacacctctcttcaggtctgagtatacctgtgtcgtccgaagcccattcaggtaatttgacataccaccaacattcttggaaatggacatcgtgttatcattgagtacaatgataaaattacttttcaatctggaagcgttattcaatgcttcatatgccataccgccggtcatagaaccatctccgatcacagatacaacgttataatgctcctgttgaagctctcttgcggccacataaccaagccctgctgagattgaagttgaactgtgtcctgtatcaaacgcatcacatttgctttcttttctcttagggaatccactcattcctccgtattttctaagatcatcaaatccttcttttcttcctgtcagaagcttgtgtgtataagactgatgtcccacatcccagatcagtttatcctccgggaaatgaagtactttatgcaatgccatcgtaagctcaacaactccgagattggatgccagatgtcctccggtcacactgatcttttcgatcagaaaccgccggatctcatccgataattctttcagctcttcctctgtcagttcttttatatcgttggccttttgaatcttttcaagtgccataagttcctcctcaccgacaatcttatttttctctatatacaagagatttcaaaagctgctcaaggaaattatccccggcagggaactttttcagttcatcgattgcttcttctgtcatacgttccacatctttatgagcctgttcgattcctttaagtgttacatatgttgtcttttcattcttctcatcactatgtaccggcttgcccagctgctctgtcgtgcttgtcacatccagaatatcgtcctggatctggaatgccattccgatctttcctgcgattttctgcatactctttacatcttcttttgatgctcccgcaaggattgctccaatcatcatagcagactcgatcagtgcacctgtcttcagtctgaaaataaaatcaagaacttcctcatcaatctgatgtccggattctttcacatctacaacctgtccaccgatcataccatagattccggcctttcttgccagaactctcatcgcttgtccgattctaaggctttcctccggaaattgctcaaatgccttgcatgctgtctcaaatgcatagtttaaaagtgcatcacccgcaaggattcccatatcctctccataaacgatatgtgtcgtctttcttcctctacggtactcatcattatccattgccgggagatcatcatgaaccagtgaataggtatggatcatctccattgctgccataaacggataaatcacttctgtctctccaccaaacagacggtatgtttccatcatcagcattgggcgaaggcgcttacctcctgccatcagactgtattccattgcttccatgatcacactctgatatccgtttgcttccggaagatattctctgagtatcgcttcaattttttctactttttctttctgttcttctttaaaattcatgactctctccattctcatccaaggcgagaactttcttttccacatcgttaattgtacgattacaacacttcacaagttccatgccttcctgatataaattaaaagaatcttcaagagaaagctcctctccttccagtccgccaatgacgcgatccagtctctcaaataactcctcaagacttgcagcctgttctatcttcttcgtgtctttcatcatttcctcccggttactgtttatgggaactttgtcctctttccccttctagttttacagtgtctgtaacgtaagtctcaatctgtccatccgttacataaatctgcaacaaatctccttctcttacctgatctgttttctttatattctgtccttgtgcattgcagacataagaatatccctgacttaatttctcaagtggagacaatcccttcatccgttctgcacaaagtgcgagtctgtgcttttcttttgtcagatgccgctccataagcgagcgcagtgtattctcagcgtcaaccgttctttgtctcttctcattgagtttctgtcttggatgaagtgtctgaagtttcaatctgctgtgttccagatgcatacgctcgtttagcagcttctgatttattgctcttcgaagtaaactctcacaattaagaatctgttctttcacttcagaatattcatacactgcaagctctgccgctgcagatggtgtcggtgctctcagatctgccacataatcggcaatcgttgtatctgtctcatgtccgactgcagagatcaccggaacgcgacagtcaaaaattgcacgcgcaacagcctcctcattgaatgcccacagatcttcaatgcttcctccgcctcttccgacgatcatgacatccacctgcttctcttccagcatacggattcctttcacgatgctgctcacggcgccatcaccctgtaccagtgcaggataaagcaggatctggacaaatggattccttctctttgccacattgatgatatctctgatcgctgctcctgtcggtgcggtcacaaccccgatcgtacgtgcatagcgtggaaccggctgtttgtactctgctgcaaacattcccatctcttcgagttctttcttcagtgcctcgaatctttcatacaaaagtcccgcaccgtccagaatgatctctcttgcgtacagctgatactttccatcccgctcatagacactgaccgcccccagcactactacctgctgtccttcctccatatgaaaagaaagcccagaccttgagcctgcgaacatcacgcaggctatcgtgccggactcgtctttcaatgaaaaatatatatgccctgatgtgtggtactttaaattagacacctcaccctttacatagattcggttcagcatgaagtcctgggtgaacatattcttaatataagaattaacctgcttcaccgtatagacatttttcattctttcgtctcttccagtgaacgcgcaatcttgccaagtactccgttaataaatgacggagcctcatctgaactgaacatctttgccagttctactgcctcgttaatcgcaactcctaccggtacctcgtcatcccacttcatctcatataccgcaagtctcagaatggacagatctactttgttcattcttgtcgtcttccatccctttgcattggcattgatcagttcatcaatctcttctgtcttctcaagtactgccgcatattttctcttaatatattctttatccttatccgctgcatcttccagtgtagaaaaatagtattcaatctgctccggcatctcctgcggatcattaaattctatctgaaacaacatcttgaaaatgtgctcgcgaagttcttttctaaccatgttggctgattcctttcctgttcgcttttattcctgactctccatctcgactcctgcaaccttaatgttcacatcagccacttcaagtcctgtcatattctcaattgcattcttaactttctcctgcactcttgcagacacctcaacgatgctgtaattgtacttcaggttcaatgccaaggatacagtcacaataccttccagtacatcaaccttcacacctttggaaagattcttcattccgagctttccaatcagttcattcgtgatgtttccggccatagaagcaacaccttccacttctgtggcagcaagcgctgcaatgatcgctacaacttcatctgcaatcttaatctcacctttgcttgcgtcgttctgtattgtataaatatttctttcgtcctttgccataatcaaaacctcctgttttgtctgattctttctacattatatcaaaaatctttctatttgaaaagatttttatgaacgtccgaattctgacaaaataagtccttcatttctctcttctgtcatacggatactccactcatgcgcaaagagaagaagcggacgtcccttcagatccatgatcttcttcatatcagatgttccgctcaagcgatccatatcgatctcttcattctcgatccaacggatgtactcatatggcagattctccagacgaatctctacattatattcattctggagacgatacttcaatacatcaaactgaagtacacctacaacacctacgataatctcttccatacccgtgttgaattcctggaagatctggatcgcaccttcctgtgcaatctgattgattccctttacaaactgctttctcttcatcgtatcaacctgacggacacgtgcaaagtgctccggtgcaaaggtcgggattccttcgtaagcaaatttctcttttgatgttgtcaatgtatctccgatcgagaagatacctgggtcaaataccccgatgatatctccgccgtaagccttatcgatcatctttctctcacttgccatcatctgctgcggctgggaaagacgcacatcctttcctccctgcacatgataaacactcataccggcctcgaattctccggaacagattctcatgaatgcgattctgtctctgtgggctttgttcatattcgcctggatcttaaatacaaatgctgagaaatctttctctgtcattggatcaatctcgccatgatctgattttcttggaagcggagaggttgtcatcttcaggaaatgcttcaggaaagtctctacaccaaagttggtaagagcggatccgaaaaataccggtgaaagctgtcccttatcaaccagttcctgatcaaactcagctgctgctccatccagaagttcaatctcatctgcaagaatgtcttttgcatctgctccgatcagttcttctgtctccggtgcgtcgatcggtatcatcttcacttcacccatcgcagtaccctttttcgtatctgagaacagctcaacttcacgttttgctctgtcgtaaactcccttgaattccttaccggaaccgattggccagttgattggacaagttgcgattccaagctctttctctatatcatctaacaattcaaatgtatccttcgcttcacggtcgagcttattgataaatgtaaagatcgggatgtgacgcatcacacagactttaaacagctttcttgtctgcgcctcaacacccttggatgcatcgataaccataactgcggaatccgctgccatcaaagtacggtatgtatcctctgagaagtcctgatgtcccggtgtatccagaatattaatacagtatccaccataattgaactgaagtacagaagaagttacagaaatacctctctccttctcaatctccatccagtcggaaaccgcatgcttcgcagttgcttttcccttaacagatcctgcctggttgatggctcctccgtacagaaggaatttctctgtcaatgttgtcttaccggcatccggatgggatataatggcaaatgttcttcttttctttatctcattcgtaatttctgacatttctaatctcctatcattttcacgcaatagataactgtccgcaggcatcccgtagacagttacataataaaccagtaaatagtgtatcacaagtcctctctgacagcaaatcttttataaaaagtttttccaaaaatatactttctattcatgaattggtgtaattacaatcttctccggctttacatccgactttcttgtcacaatatcctcaatctgggcacggttcgcatccgtaagctcctctgcatttacaacaacatctgcactatcttcccccagacttactactgcctctgaaaatccttttgttgccatcaatgtctcaatttccatctccgtctctgattgttttgtaagctccaccatctgtgcaactgcatctgacttttcctcttcactgagctctgtattgtctatgatcgactgcagtgtttctttattctgggcacgcacctgttctcttgtaacttttgcctgggctaccgtagtctgggctgaaccatttgttagaaccgcctctccaggtgttccttctgtttcagaatcattactttcaatttcttcgcttcctgcttctgtatcttcctgtgaaatatctaaaagttcctggtttgtaagatctgcattagcttcttttgttcctttcgcattctctccaaacagacgtcccgtgtagttcagatatcctgctgccgcgatcataaccgcaagtgccacaatgatcaactggtttttcttcacttttcctttcattaagataaacctccttttatgtaggcgcacgtttcattatttttatcttatgcgcttctacaccaaataatgcctgcaccgcttctgtcagattcttcgcgacaactgcattcccacctccatctgctattacaagaatgccctccacttccggtgcattttctttacttacatatgggatctgcgttccgtctgtcccctgactgtacacggtcgttttatccagagatttctcttcactttctcttgtctctccctggctgtctgcttccttcgtcgtctgatgtgtgctttgctgatctttttcaaccaccttctgtcctgtagactttaatgtgatcatcaccgtcacctttcccgccccatctacgacaccaagtgtctgcgctgtcttctgttccagatatttttcatagtctgccatggaatctgtctcatacgtctctcctttcccggattccccgtcaatctttgtatccttatccacctcccctgtcttcggaaccggaaccgcaactacaagaagtagcagtccacacaggaataaaatggctaatcttgttcttttctgaccacgatccgcctgttttatcttccttgtgtatcccacgatcctttccttccactcctgccaattattgtccaattccgatttcctcccgttttatagaatccgacatccgctctatttctttctcatattgctgatacacttccttctgataaaattgctctgctttcaatcctttcaacgccgcaataggggatagtgcaagcaggatcaggacaagtccacagaaaaaacgaatatatttttcataatcttttcccggaatcacctgcagaactgcactcataacgagaagcattgaaatgattttttgtatccattgtgtaagcatccggcagattcctcctctctcctctgaaaccttaagatgttacagccaccacaagtgcaatgcttaagacaaacaacagtgttgtggatgctattaccttcaccataagctgataaccggaactaactccagatatgcatgttgtaattctccggtcagaaaccggttggactaatgccgccacaagttggtacaaaaatgccaatatcagaaattctaccagtggaataagtgccaggacagctataaaaatcattcctgctacaccgattccattcttaagcagtactgcgactcctaatgcaacatccattgtacctccggcaacatctccgatccacggaaccgcctccagtgttcgtcctgcagcagtcattttcaaagaatcaattgccggattcaaaaatccccggatcagactgatcccactcacagcggcaatcatacttttcagactccattggatacatttttccagaagttctgcaaattctgagaaaagatcttccccggtcaggcaggataagaccctcaccatcccatagatcttcaccgccggtaaaagaaaatgaagtacaagcagttccaccagatagatcaggaacagtattgtattataaaacatcaacgccgaactgctctttccggtaaatgcaaccgccagaaagaaacttgggcaaaacacctgcatcaattggacaagctctcctgttttttcttcggcatataaattcatcgattgatatgcttccagacagattgcgatcacaacaagatacaaaatataaaaacccgcttccgctgtctgtctgttttgaaagatacttgtaaaattcgagaaaaatgcagccgccactgtaatcagcagcaagcgcgccagattcttccttcctttctgaaaaacagagaacacctgtcctgaaaaaaactcaagaaatctttctcccaattccttcgtatttccgctgatcagcatctctgtaagatcacgaaaccgaactttttctcccagttctgtctctcctgataactgatcgatctgtctgaaatcaaattcatccagcagactttcttccatttgttccagctcatcctccaacatcccggaacgatcttctgtttccttttcctccgatgtaccatgctctgctgcatacacgctgccacatcctgtcacaaccgtaaataaaaacacaaaacagaagagctttttccaaaaatgtttttcccttttcatatcagaaaatctccgattagttccagcagcgcaagaagtaccggcattcctatcgcaaggatcgtcaactttgtaaaaatctcaatctgtacagcaatattctgataccctgcatctttacagattccggatgcaaattcagccacataagtcacaccggccattttcaacagaatactcatctgtccggcatccagttttatataatctgcaattttctttactgtccgcacaaagatttcaagtcgtgaaagcatacaaagaaataaaaacaggctgactgcaagacttacataaatgccatattcacttttcccacttttaaactgcaaagcaagtaatgttcccacgacacccaaaagtgcgatttgtatactgttcaattcttttccgccctccttaaagagaaaacaattgccggatcgaagaaaataagtcataaattgccgggagaacccaggataatacaagaatcagccctgcaagacttgtcaggaatgcctgttcctctctaccgctatgcttcaaaacctgacttagaatagatacaagaattcccaccgccgcaattttaaatatcagattgatactcatactctccctcctctcccttttgttcccgcccttttaaagcagaaggatcacaagaaaaatcccgcctgctgcccccagccagctaccgagctttttcttctcagacgtttccgcagttctcttttcaatttccatatccagccttttcaaatgatactccagcagacgaactacaccttctctgtctcctatttcaagcagttccccaggttcgcagatcagaggattcattttccctctccatttcagttccggaagatctttttctatcgtatctgtccacaagtcagcaaaccgcttttcctgtgtgccctgacattgaaatgccagatccatcagccagttttcatagggttccttctctcttgatgcaatattataaaaaatttccgaaagcggaagtcctgcatacagtaattcgccttttatttgttctataattctgcgaaaatgactcaattcttccagataattccgaagttcttttccatacatccatcctgctccggtcgtcgccaacaagatcagaaaacatccgactaatttctgcacagcacacgcccccgctcatcatagatttcccggatcttgccaggaccgtgatcctgtccaagcacaacataacgctgaaacattcttctgcggatcaggtcacccaggatcggctttttagaagcctcatccatatcaaggctgtgtacactcgcgatcagccggcagccgcactgcatggcatattcaatggcatggatatcctcacttgtaccgatctcatccactgcgatcacacgcggcgccatagaacggatcaacatgatcatcccctccgctttcggacaacagtctaaaatatcagtccttgtacccagatgattctgcgcgattccaagataacacccaccaagctccgatctttcatctaccacaccgacagaacacccttttatgtattcatttccatccgatatctgacggatcagatcacggatcaaagtagtctttccgcaacacggcggagaaatgatcaatgtatggcaaatctgtttattttccgtaatatatggaatcaatgcgtcagcacacccaagtacttcgtgagaaattcttacatttagcgaagaaatatactgtatattttttactttttcattttctataattacttttcctgccaccccgaccctgtgacctccttccactgtaataaatccctgtttcaactcattttcatatgcatagagcgaataatgacaaatatatcccattgtctcaccaatatcttctttcgtaaccagatacgggtgtaccgggtccggaagaacccgttcctgccctttcatctgaatcagcagcggctgacctgtacgtatcctgatctcctgcagttcctccggattgctgacggattcttctacaagcttacggattttttctgccagcagattccagacctgcatcttcttgttctgtctttccatttccatcttgtccacctctccagttgttgtccgtacccctcctctctacacaatatatggataagattcttaaagtattccttgcgcatacaagaaaagaggaacaaaacccagtttcctgaattctgttcctcttttcttattctttctgattcttattctgcaacatctttcatgctgaagctgaatcttcccatcttatctttaccaaggcatacaaccttcacaacatcaccgatgcttacaacgtcttctaccttgtcaactctctgcttagaaagcttggaaatgtgtaccattccttctttacccggtgcaaactcaacgaatgctccgaattctttgatgctgataacctttccttcaaaaagctgtcctgcttcgtaatctgtaacgattgtctggatgtacttcgcagctttctccatgttctctttctctgtaccgcagatagatacatttccttcatcatcgatgtcgatcttaacacctgtctcgtcgatgattgcattgattgtcttaccacgctgtccgacaacatcaccgatcttctgtggatcgatctgcatctgaataatcttcggtgcaaactctccaacttcttttctaggctcagcgattgctttactcataacttcatccatgatgtaagttcttgctttctttgtagcagcgattgcttcttcgatgatcggtcttgtcagtccgtggatcttgatatccatctggattgctgtgataccttcgtgagtacctgccaccttgaagtccatgtctccgaagaagtcctcgagtccctggatatctgtcagtacaaggtaatcatcatctgtctcacctgttacaagtcctgcagagatacctgctacagcagacttgatcggcacacctgctgccatcagtgacatactggatgcgcagacacttgcctgtgatgtagatccattagactcaaatgtctcagatactgtacggatcgcatatgggaactcagactcgcttggaagtaccggaagaagtgctctctcagccagtgctccatgtccgatttcacgacgtcccggtcctctggaaggtcttgtctctcctacagagtaggacgggaagttgtagtgatgcatatatctctttgtcttctctgcttcatcaagaccgtcgagcttctgtgcttcagaaagtggagcaagtgttgtcattgtgcagatctgtgtctgtcctcttgtgaacatagcagaaccatgaactctcgggatcaggtctacttctgctgcaagcggtctgatctgatcgatcgcacgaccatccggacgcttatgatctttgaggatcatctttcttactgtcttcttctgatactggtaaacagcctcaccaagcttcgcaagatactcttcgttgtctgcaaatgcttcctcgagtctctctgtgatcacacggatattctcttctcttgtctgtttgtcatctgtaaatacagcctcttccatctcagcagccggaacgatctcctggatcgcatcaaagagttcctgcggaacagcaaagctctgatactcatgttttggctttccacactctgcaacgatcgtgtcaaagaaagcgatcactttctggttcagatcatgtgccgcaaagattgcttcaatcatcttcgcttccggaacttccttcgcaccggcctcgatcatgataaccttttcctttgtagaagcaactgtcaatgcaagatcagatacttccttctgtgctgctgtcgggttgaatacgaactctccgtcaacgagtccaacctgtgttgtagagattggtccgtcaaacggaatatcagaaatacttgttgcaagtgcagcaccaagcatagctgtaagttccgggctgcagtcctgatctacagaaagaacaaggttctcaagtgttacgtcatttctataatctttcgggaaaagaggacgcatcggacgatcgatgacacggtctgtcaggatcgcattctcagatgctttaccctctctcttattaaatcctcccgggatctttcctacagcgtacattctctcattatactctacgctgagtgggaagaaatcaattccttctctcggcttgtcagatgctgttgctgtacacagtacagttgtgtcaccataatgcatcagcactgcaccattcgcctgttttgccacacggtcaacatccacgcgcagtgttctgccggccagttccatttcaaactttttatacatggttttctcctttttatcttatcttcgttttatatgagcagaacaattcgctccgaaactactgaaaaatgtactattccatagcaattgaagcccactgtaatcgattgataatacacttttcagtggtctcggttcttctctgcccacaagcttttaaattatatcatattccataataagaagtaaatagttttccaaaaaaagaacaaaaagtaccaaaaattcagacaaaaagaaacagaccagaaaccacatcatcagatgcagcttctgatctgtcaattgatcttctttttgggaaaatcttattattttctcagaccaagtttctcgatcagagcacggtatctctcgatatctactttcttgaggtatgcaagaagtcctcttctctgtccaaccatcttaagaagtcctcttcttgagtgatgatccttcgggttagctttgaagtgatctgtcagctcgttgattcttgctgtaaggatagcaacctgtacttccggtgatcctgtatctccctctgttcttccaaattctttgatgatagcctgtttcttctcttttgcgatcattgtaatatcctccttaaaattcttagttaaaccgcctggcattaagcaatggtcggagtgatccgattaccgaacaccggctgatttgatacctcggatagtatagcacagagatatctgcttgtaaagcacaaatttaaaatcttttatctttcatcgaatggatgatttttcagatattcctctccgtaccgcatatctttcatcacgcggtctttgagttcttcaaccgaatgaaatttcgtttccggacgttcgaactccagaatctgcactgtagcagtcttcccgtaagcatcgccttcatatccgtaaacataaacttcgaacaaccgtcttttctcttgcgcaacggtcggtttcaccccggcatttcccacaccgccataccatacaccatccacaagaacgcgacaggcatagacaccgtactttggcaggattttcttttcctgcggtgcaagattcattgtcggaaatccaagtgttcttccaagctgctgtccatgttccacaacgctggtgatctcatacggataccctaaaagctcatttgcaagaggaacatttccatcgagaagaagttccctgatataagtgctgctgatctcccggtctttgtaatatgctttctcgaccacatcaactgtgtagccatatttcgctgcatatttctccagcatctgatgattgcctcttttttcatgaccaaagttaaagtctgttccgacaacaatgtgtgatgcgtgcagcttcttatataagatctcttcgataaatttctctgcttccatctccatcatttctctcgtaaatggaatctcgatcagataatctaccttgtcctcaagaaatgcccttcgctcttcatttgtcatcagacaatctctgtccatatcaaatgcacaaacaacactgtcacagtcttccttctgcgcatattttattattctgttgagcagcttctgatgtcctctgtgtaatccgtcaaactttccaagcgttaccgctgtctgatttcttccgtcaaaggcatctaatccttttatatattgcatgtctgtcttattcgtcctttatttctcaattttctctgcttcaggatccagaaacattttcttaatatggaatagcttcttcggtgcacgatactgataaaggccgataaaattctttctggaatcatatactctgacttcctgcccatctgtccacgcttctttttctaacagaaaacgttccggaagatcatttccgttataagacatccatgccttcgcatccatcacagtaacggccggcagttccgcgaagatctgatccagaggagtgaaaagttctgcaccttctccctgttccatcttctgtcgcacttcatccagtgttactgcatcttctttcaggaaacggccgactttcgtacgctcaagttcttccatacagccgcccacccgaagcttctctccaatgtcatggcacaaagtacggatatatgttcccttagaacagtccacctccatacgcacatgtggaagattcatctccagaatgcgaattccatgaatctggacttttctgctcttacgctccacggtctttccttcacgggcaagctcataaagcttcttcccattcactttcaacgcagagtacatcggcggaatctgatcatattctccgataaatgattcgatacaggaacgtacttcctcttccgtcagatcgcccggatccctctcctccagaacctctccggaaatgtcctgcgtatctgtcgtctttcctaaaagcagcagagcctcatatgtcttatcatgatctgtcagaagctcacaaacctttgttgctcttccaagacacaccggaaggactcccgttgcatccggatcaagcgtacctgtatgaccgatcttcttctgtccgacaacttttcgaagaactgcaaccacatcatgggaagtatatcctttttctttgtaaatattaactattccgtttatcatttttcctcgtttttctcttctgccactctaagctgtctttcaattaaaagtgtcagattgttgatcacatcatgcggggaacctttcattgtaacaccggctgctctcacatgaccgccaccaccataatatttcgcaactgcacttacatcaacgatttcttttgatctaaggcttactttaaatgtctgcggttcgagctcgtaaagaaggattgcaacctccacacctcttgtctgacgcaatacgctgacaattccatccaggtcagacggttttgcctggaagaactccatttctttcaaacgtatcactgagacaaccgctttcttattcaggatcatcatactctcaagaagtgccttcccaagcatctgattctgaacataggatttttcaaaatatgttccgtcaatgatcgcgcttccattgatcccttttcttaaaagtgcagcaccgacttccattgtctccggtgaagtacaggaatactggaacactccggtatcatgcacaatccccatataaaggaaagatgcgatttcttccgtaatcttctcctcatccagcagacggaaaacaagttcagaagtagaacttgcatccggcacgatataattcgtgtctgcaaaagactcgttactgacgtggtgatccacacataaagtttcctttgcattttggaacattggctcggaaaaaccaagacgtctttcgtccccacaatccagactgatgaaaaggtcataaactttgccttctacaatctcatgcttcggcacatcccagtgtcccatcatctgaaatgcttccggaatctcctccagatacagatctgtctcaatctccggataataagtggtcagataaagatataatccaattgtagaaccaacgcagtccccatccggacgaatgtgtccgccaatggctacactgtgtttcccttttaatacatcgtttaatacgatcatctattcctcagctccatccttcaaatctcttgtcacttcgtcaattttcttgctgatatttactccatattcaatggactggtctacgataaatgtaatctgtggtgtgttgcgcatattcactgtacgtgcaagttctctgcggatatatccctctgcactctgaagacctttgatcgtatcttcctgtgctttcttgtctccaagaacactgatatatgccttgcatgtcttaagatccggtgctacttcaacagcaacaacagatgtcagcggtgcaacacgtggatctttgatcccgccacgcaggatattactcagctcacgctgtacttctgcattgactcttgtattcttaatactgttctttctcatgttataactcctttttatacagaaaagttactcctgcaatgtatgacccctgcacgagtaacaattctgtcacctgctgacaattacaacactctgcaaatgtcggcatcttttattcttacttgcgttctgtctctaccatcttgtaggcttcaacctgatcgccttctttaatgtcattgtagttctcgaatacgagaccacactcatatcctgttctgacttccttcacgtcatctttgaaacgcttcagagatgccagcggtccgtcgaatacaacgattccgtcacggatcagacgaacagaacagtttctctcgaagataccgtcaagcacatacgcaccggcaattgttccaactcctgatgccttgaatgtctgacgtacttccgcatgaccgagaaccttctcctcaaagacaggatcaagcatacccttcatggctgcctctacatcttcgatggcattgtagataactctgtaaagtcttaagtcaacaccctcgcgctcagcgatatctttcgctgttgcatccggacgaacgttaaatccaatgatgatcgcatttgatgcagatgcaaggataacgtcagattcattaattgcaccaacaccgccatggatgatcttaacaacaacttcatcgttactcaacttcagaagactctgcttgattgcctctacagatccctgaacatcagccttaacaacaatatcaagttctttgaggttaccttcctggatctggttgaacagatcatccagagacatcttggacttcgtctcttccagaagttttaccttgttctgggaaataaatgtctctgcaaacgctcttgcttctttatcagactcacatcctacgaatacttctcccgcattcggaacatcattcagaccaaggatctcaaccggctgggacggacctgcttctttcacacgtcttcccttgtcatccatcatcgctcttacacgaccatgagcgcttcctgctgcgatcgcatctcctacgtggagtgtacctttctgtacaagaacagttgcaacagatcccttacctttatcaagctcagcctcgatcacaagaccacgtgcggcacggttcgggttcgctttcagttccataacctctgctgtcagaaggatcatctcaagaagatcctggattccttcatgtgtatgcgctgataccggaacaaagattgtgcttccgccccagtcttccggaatcagttcgtattctgtcagttcctgttttacacgttcaacattcgcacttggcttatcgatcttgttgattgcaacaataatctcaattcctgctgctttcgcatggttgattgcctcaattgtctgtggcataacaccgtcatccgcagcaactacaaggattgcgatatctgtagagtttgctccacgcatacgcattgcagtaaatgcctcatgtcccggtgtgtcaaggaatgtgatcttttctccgttaatctcaacaacagatgcaccgatgtgctgtgtgataccaccggcctcacgacctgttacattactgttacggattgcatccagaagagatgtcttaccatggtcaacatgacccataacacatacaaccggtgggcgttttaccataaggctttcgtcttcttcatcctctttcagaagttcttcgattacatctacaacttcttctttctcacagagaacatcgaattccatcgcgatctcttctgctgtctcataatcaacttcctggtttacagttacgatcttgccctgcatgaaaagcttcttaacaataacagaaggaacgatcttcatcttatcagcaagctctttaattgtaagaacttctggaatcacgatctgtttgatctgctcttcctgcttctcttccttcacctgtggcttcttcacttccactgccggtttctgcttcttgccttttcttccttttccttcgaaagcttcatctctgtattctttcttcttattatctctttctttgtctttcgctttgtttctctgtgtcttctgctgttctacgatcggtgtagcgtcacttctgtcgtttctgcgattgtcatttcttctgtcagagcgctgtccctgtccgcgtccgtctcttccgtcacggttctctcttccatcacggttgtcgcgtccctggaatccgtcacgtcctcctctgtcagaacgctgtccgcgtccgtctctgtcctgacgtggtcctctgttttcgcctctgttctcgccattagaacgtctgtctccaaatggtttctgtcccggtctgtcagagcgtacctgtcttccctcaccgctcggacgtcctgttctttctgttcttgatccctgcggtctctcagaacgtgctccgttctgtgccggacgtgccggtctgtcctctgctgcacgaaccggtctttcgctttttgctgtcggtttctctgtacgagccggttttccttcaccattcgaacggctctgtcctgctgctgggcgttttccatcaccgtttggacgaccctggttctgtccctgacgtccctgtcccggacgttttccctgcagtctgctgctgttctttgaattctgtgggcgaactacaaatgcaagatttttcttctttggagcaccctctttttctgttgttttatctgcagccatctcagcatctttgccagctgcttctcttctaatatcttctgccacgttatcctccctggtgtttaaactctttttattttcattctgcatcttctcatctgccatataaatctacctccttcaagcaatcaacggggaacctttgtcttctactcccattcatcaggtacgggatttcagttcttttaatattccttttgcaaatccttcgtctaatatcgccagagatgcacggaattgttttcccatcgcatgccccaaggtatctttatctccgtaaactatcattggaactttataaaatttacacatatcacggaattttttctttgtattatctgaagcgtcttctgcaacaactacaaggcttgctcttccggactttgtctgtccttctgtcataaattcaccgcttgcgcagcgccccgctttcgttgccagactgatcagagacagtattttatctctagccaatctcatccatctccttttccagccgttcatatacttcctgcggtattgcctgcttaaaggaacgctccagtcctctgttcttcacagcctgctcaaaacatgccttctgcggacagagatacgctccacgtccgtttttctttccggttgtgtcaatgacaaattcttcttcctctgttctgaggatccgaatcagttccttctttggtttcatctcgccgcagcctacacatttacgcataggtactttcttctttactgccaaacaattcactccctcagatcttactcttcgtctgtctcaacgaattcaatctcatctgctccgtcttcatcagctgcatctgccggaacatcatcgtactcttcttcctcttctccgactgtatagccttcttctccgaccatacccatctgctccatgtagttctccggaagatctccacactcaattgcctgtgtctcactcttgatatcgatcttgtatcctgtcagacgggctgcaagtcttgcattctggccttctttaccgattgcaagtgaaagctgataatcaggaacaataactcctgcaatcttctcatccggatcagccataacagaaataaccttcgccgggctgagtgcattctcaatcagaagtgccggattctcatcccagttaatgatatcaatcttctcaccacgaagctcttttacgactgcatttactcttgcaccgttcataccaacacaagctccgaccggatcaacattcggatcgttagaccatacagccatctttgtacgagaaccagcctcacgggcaatgctcttgatctcaactgttccgtcctttacctctgcaacctctgattcaaacagacgttttacaagttccggatgtgtacgggatacaaggatctttggtccctttggtgtgttcttaacttctacgatataaagcttaatacgctctgtcggctcgaaatgctctcctttcacctgttcgttctctgtaaggattgcatctgcttttccaagattcacactgatattcttgccaatataacgctgtacgatacctgttacgatatccttctctttctcgaaatactgatcaaatactgccttgcgctcttcttctctgatcttctgaagaatcaggttctttgcattctgtgttgcaatacgtccgaattccttggaatgaagctcaacctgtgcgatatctccgatatgaagtgccggattgatcttctctgcatcctcaagactgatctcgattgcaggatcaaatacttcttcaacaacttctctctctgcatatacagagtagtcacatgtgttgcggtccataacgatcttaatattatcggatgttccgaaatggttcttacatgcacttaaaagtgaattttcaatggcctccaacatgacatccttgctgatgtttttctctttttcaagaatatccaatgcttcgagtaattctgtgttcatttttctttcctcctaaattaaaaatccaaagcctgacggatcaaagcgatttcttttctgtcaaatgtctgctctgtctcatcttcgtatgtgatggtcactgtattctcatcataactctttaaaattccgacaaactctttctgtcggtcgattgcacggtatgtgcggatctctacttcttctccaagatttctcttaaaatccttctctttcttaagtggtcttccaagtcccggagaacttacttcaaagatataggagtcttcaatataatccttctcatcaaggatatcggagaatctcctgctgactgcctcacagtcatccacggcaattccgcctggtttgtcaatatacgcgcgaaggtaccaggtacctccttctttcacatattctacatctaccagctcaaacccgagttcctctacgataggctcgagaagtgcttctgtctgctgttcataatcttctcttctggacacgctgcgtcaaactccttttcttctataatatagtttgtgatctgattcataaagaattttccatatcaccaaagaagagtgaactttcgtccactcttctgccaattccttatgtaactatatttactctagcacttttctttgaggaaatcaagggtttttgcacattttcttacaacaccttagaaatccccttaactttctctttcttcaccgtctccgcttccggcaagacttctagcggcttttggttcctgttccatcccgtttcgccagtttcaggcggttcagtgaaactgtcttttctccataagtaatcttcgtctctgttccttcttcaaaaagataaacttcttctaattcatccttcttctgaagcttaattcctctgacaccgacagctgcttttttcttctccggaacatccgcagataaaaacctcaggaaatatccgttcttcgtctgaaggacaacattctgatactccgtcacaaccttcactgcgacaagcctgtcttcttcctgcagctttgttgccgcgatcgtgcgcttggatacctggaactcacttccatccacacgcttgatcattccctgtgctgttgcaaacaataattttgaataacacatctgctcttcttcacagatcataacaatttgttcttcactgcttgaataattacttacattatcaatcggaatccctttgtctctgaactttccatgtggaagatcaagcaccttcacctgatgcatcttgccttcatctgtaaacagacagagttttccaatgttcatacaatgcacaatgtatttattctctttgtctgcagcttctttattcctctcatagactccggtatccactgtcttcgcgtaaccaaagcgatccatcagaaagacaacctgctgctcttcaatcttcttctcttcaaaaacagcttcttctgcattctccacaacggtacgacgctttcttccgaattcttttttataactgtcaagctcttccatgatcacgcctgccatagaatcatagttatttaaaatatcttcataacgggcaatattttctaatgtcttctcatgttctttctgaagtgcttcaatctccagaccgatcagacgataaagacgcatctccagaattgccgttgcctgacgttctgtaaaacggagcattgccgccatctttttggaaatcgcagacttgaacttaatgttttccgtctcaccgtttaccagacaggcacgcgcatcttttacagatttacttcctcgtaaaatctcaatgatcaggtcgatcacatcacatgctttgatcagaccttcctgaacttcactcttctcccgctctttgccaagcaaagttgtatatttcctcgttgcaagctcaaactggaaatccacatgatgttctatgatctgtttcagacttaaagtctccggtctgccattcgcaaccgccagcatgtttacgccaaatgtatcttccagacgtgtcttcttataaagcatattcttcaggttctcaacatccgcaccacgcttcaattcgatcacgatacggattccttcttttgaagactggtttgaaatatcaacgatatctgtcgtcttcttggattccacaagattgcatacgtcgtttaagaactttccgattccggctccgatcatcgtgtatgggatctctgtgatcacaagctgcttcttgccgccttttaattcttccacttccacttttccacgcagcttgattttcccctgtccgctctcatagattgccggaagatcatccttattgaccacaattcctccggtcgggaaatccggtcctttgatatatttcatcagctgctttgtagtgatcttgtcatttttcatatatgccttgaccgcatcgaccacttcgcagagattatgtgtcgggatacttgtcgccataccgactgcaattccttccgcaccattgatcaaaaggttcggcacacgcatcggaagcacaagcggttccttctccgtctcatcaaagttcggaccaaaatcaataacattcttatccagatcggccagacatacttcctgcgtgaacttcgtaaggcgcgcctctgtataacgcatcgcagcagctccgtctccctcaatggatccaaagttaccgtgcccgtcaacaagaacctgtcccttcttgaagtcctgcgccattactacaagagaatcgtagatggaactgtctccatgcggatgatatttacccatcgtatctccgacgatacgtgcactcttacgataaggcttatcataacggataccaagctcgtacatatcataaagtgtacgacgctgaaccggcttgagaccatcacggacatccggaagtgctctggcgataataacactcatcgcataatcaatataagatttcttcataagatcagaatattctgtccttatgatctgtgattcattactcattcttcttctccttagatatccagttctgcctctgtcgcattttcatagataaaattacgacgcggcggtacttcagttcccatcagcatctccgttacacttgaagccattcgggcatcctcaatctctactcgtttcaacatacgtctctccggatccagtgttgtctcccagagctgctccgcatccatctctccaagacctttgtaacgctgaagtgtgaacggacctgtatgtgtctttctataacgttccagtgccttatcatcatacagatactcttcttctccactctttggcattgccttataaagtggcggcatcgcaatatatacatgtccttcaaaaataagctccggcataaagcgatagaataaggtgagcaataaggtagaaatatgtgcaccatcgacatcggcatcggccataatgatgatcttatcatatctcaactttgtaatatcaaagtcatttccgtatccttcagaaaatccgcagccaaatgcattgatcatcgtcttgatctctgcattggcaagcaccttatcaatacttgctttctcaacatttaagatcttaccacgaatcggaaggattgcctgataatttctgtttctcgctgtcttcgcagagccaccggcggaatctccctcgacgataaaaatctcgcacttctccggatctctgctctcacagtttgccagctttccgttactgtcaaaagaatacttctgctttgtcaggagattggtctttgccttctcttctgtcttgcggatcttcgcagctttctccgcactggaaagaactgtcttaagtgtatccagatttcgatcaaagaaacgaacaatctcttctcctgtcaccttgctgactgctttcgccgcatccgggttatccaactttgtcttcgtctgcccctcaaatctcggatccgggtgcttaatggatacaattgcagtcattccgttacggatatccgcaccggtaaaattcgcatccttttctttcaggattcctatctctctcgcatactggttcatgacagttgtaaaggttgtcttaaatcctgtcagatgtgttccgccctctgcattataaatattattacaaaatccaagtacattctcatgaaactcattcacatactgcagtgttacctctacttcaatcccgtctgcttcccctttaaaataaaccggttcatgaagtacttctttcttacggttcagatcctggataaatccaatgattccttccggttcgtgataaacgatgtgctcaacacttccatctctcttatcatcaaacacgatcgtcagattcggattcagatacgcagtctcatgcagacggctcttaacctcttccgctttgaacttcgtcttctcaaagatcgtatcatccggcagaaaatttaccgttgttcccgtctttctcgtctttccgatcttaggaagaagtccatcttccagttcgatcaccgggattcctctctcgtaccggtcatgatgaacaaatccatccctgctgatcttcacatccatataagtagaaagagcatttacaacagaggaacctactccgtgaagtccaccacttgtcttatatgcagaatcatcaaacttaccacctgcatggagtgtcgtataaaccagacgagccgcagatacacccttctgatgcatatcaaccggaactccacgaccgttatctgaaacggttgcagatccgtctttttccaatgtcacctggatctcactgcagaatcctgccaggtgctcatctactgcattgtccacgatctcatagatcagatgattcagtccttttgtagaaacacttcctatgtacattcccgggcgtttccgtactgcctcaagaccttccaataccgcgatactccctgcatcgtatgtattatttcccgccattactctttctccttctttctcgaactcaaactgttctatacagtcaatcaacaagtatgatatcatttaaccatctgattttcaacttctttttcgctcatatgttctgtcaaccttcttctgacaagagaagactgtaactgtccgacaaccgtttattctgtaactaccctctttaatgtccgttccagcacctccattgcattcttcatctcttccaccgtatttgtctgcgcccctgcttcgatcaacagagactttggcagcagatgaagattataacggtaagctttcagataaatatgccttgcaaatcctgggtaatactgttccgatgcaatctgcatctgcaaggagaacgccagattatcctggatatatggattatacagataggcaatatcgccatttgtccgtgtcctgctcaatccattaaaatacatgatcttcgcagtcggttttccattcacttccgttaccagatgtgtgtccgcatttacaccgtctctgtgaagatcgattgcaacttcaatcgtcggattcgcttccagaaccggccgtactgcactttctgcattctcatatgccctgctgcggtcaagtttcccattaataatatcatacactccgctgtcatgaagcgtctcaatcccatccgcatttaataactgcgtcagatattccccaatcccaacgatgcttgtagatggatcacccggtatggagtcggcaaattcttcctgtgaatgcgtatgaaagatcaaaattttcggacctcctgtactttgatctatcttcatactccggtttaaaagatcgtccacattaagctgctccggtccgatcattgtagaactgtctattgtataaagattgcttgtcagatattcaaaatcacgcagccgctcaatagaaagatccattccaggaaccggctgttctacagcactttcctgagttgccggctctgctccgaccagttttccctcttcatctaccgcatgttcatcatttgcctgacactgaagaatccatgcgatcgtctcctcatcttccaatacttccgccggttcttcctttccccttttttctgtctgatcttccagatatcctgccaacggcatccacacatgaagtggaagcctgaagatctcttccctttctgattcctgttctttctgataagaaaaaagcggaaggtacaatttctgcgcataaatctgactttcttctaataaaaatgttctcccctcttccaatgaccggcccatcccaattcctaacggaatacctgccagagccagaatcaccccataccatttcatacgtcggattgtttttttcttatacacacgcattgcagagtccttccgctcatttctatcattctattcactttctcctgcatttatatcagaaaaaagaagattcaaggacgctgctatcgtatgactgatctgatggaccatttcatccacatcctttggtgtcacaaacattccatttaaatgtggggagatcaattcttttacaaactcatatttttccgccgcactataagagcgcaaaatctctcctgtactccttaatgcctgcgactgctccagtgcagtgatgaaattttccatcgtatcattgacgatcgttgccgcatcaacaaccgtaggcactccgattccaatcacaggaacccccagggattcttccgtcattgcattcctgtaatttccaacaccggaacctggatgaattcctgtatcggcaatctggatcgtccggttcaatcgtctgctgtttcgcgcagcaagtgcatccactgcaaggatcagatccggcttcgtctcatggacaattccacggacaatctccgccgtttccatccccgtctgtcccatcacgccgggaacaattgcactaagaacaatcaattgctccgtgcgcatcgcatattttccgtattcttttactatatgccggtttacctccagatgatctgcaacataagggccaagcgcatccggtgtcaccgctctgttaccgagcccgacaaaaagaatctttaattcttttccatctttacaggaaattttatgaaaaatcaattcccggatgcaatcacagatccgttcctgtaataccctgctattttcttccacctccaatgccagatccggagattccagtgtcagataaatgcctgtcggttttcccatgatcttcgctccattctccgtctcgatcaccacacgggtcagccggatctcattctcctcgtcatactcttcctccagaacaactccctgcacttctacattgtcagatgcaaaacgttccttctcctcaagtgcaagatccgtacgcacactgtaatttttcatcatagcctcccttttctccgtgtcaggttaaagattcttgtatactgtaaccacgattcgttttattacagcctatttttagcatttttttgtaaaatatgtattgacagaacacgtttgttggactagaataaatgagtatgtttcgatagaacgtccgtgtccgagtctattgaacacatgaatcacatttgaaaatcatatgatagaatattttggaggtgcacacattggctaatattaaatctgcaaagaaaagaattttagtaacagagacaaaagctgctagaaacaaagcaatcaaatctaaggttaaaacagctgtaaagaaagtagagacagctgtagctgagaagaatgtagaggctgctaaggctgctcttcacacagcaatcgttgagatttccaaagctggaagcaagggtgtttatcacaagaaaacagtttccagaaaaatcgctcgtctttccaaagctgttgactctatcgcttaattataaatagagaatagaattttcagtcgcatctgctaccgtcatggcagatgcgacttttgttatacgttcagagccaggcagttctaaagatacagatacgagccatgctcgcatgagcgagattctgtattcttagaactatgtggcggatacgccacatcgataaaatgcgtagcattttagagatgcctggctgctgcacgacgcctcagtcaaaaagaccggcacttccaagtcttaacctgaaagtaccggtcttctattatcttattctataatctcagacaactgattagttgttgatcagtttgtcctcatcactccagctgtaaagctttctgatctcagctccaaccttctctgactggtgctcagcagcaagttttctcatagccttgaagtgaacctgtccacctgcatcagacatatcaagcaggaagtcttttgcaaatgtaccatcctggatatcagaaagaattttcttcatagctttctttgtctcagctgtaacgatcttaggtcctgtgatataatcaccgtactcagctgtgttagagatagaatatctcattccagcgaatcctgactggtaaatcaggtcaacgatcagcttcatctcatggatacactcaaagtatgcatttctcggatcatatccagcctcacaaagagtctcgaatccagcctgcataagtgcgcaaacaccaccacaaagtacagcctgctctccgaagaggtctgtctctgtctctgttctgaatgttgtctcaagaactccggctcttgctccaccgattccaagaccataagcaagtgctctgtcaagagcctttcctgtgtaatcctgctctacagctaccagacaaggtgttccttttccagcctgatactcgcttcttactgtatgtcctggtgccttaggtgcgatcattgtaacatcaacattcttcggcggtacgattgttccgaaatggatgttgaatccgtgagcgaacataagcatgttaccctcttcaaggtttggctcgatgtcttctttgtaaagtttagcctgtttctcatcgttgatcaaaatcatgatgatgtcagcctgctttgcagcttcagctgctgtatatactttgaatccctgctcttctgctttcttccaagaacggcttccctcgtacagaccgatgataacatcacatcctgactctcttaagttcaatgcatgtgcatgtccctggcttccgtatccaatgatagcgatcttctgtccttcgagaagagaaaggttacaatcttcctgataataaatttttgctgccattttgcattcctcctaaatgaatttaaaatatagagtagaatgctcccgatctctgcgggggtatcctatatagtgaaaggtcttgtcctttactagctttatctgttccgccggtttttccgcggttctctgactcttaatgaatcagaaaaatgcaacatccttgctgcctctggaaagtccggtaattccggttcttgccagttcgagtatctcgtaatccttcagaagattcaagaaagcttccaacttattctgtgtacctgtcaattcaatgatcagacaatcttcttccacatctacgatcttcgctctgaaaatatctgcaactgagatgatctccccacgctgtgcggcattcgcacgaagcttcaccatgatcaactctctgcaaacggattcttctgctttcaaagccttgatatccacaacatcctccaacttacgaagttgcttctcaatctgtgataggatctgctcatcaccggatgaaacaattgtaatccttgtaaatctaggatctgctgtcatacctgccgtaatactgtcaatgctgtatccacgacggctgaagagtcctgaaattctgctcaaaacacctgaattgttatctacgagcagtgaaaatacctgacttctcatatgtatcctctctttctcacttcaggaagcgaaaatattatgactgactaagatgactggttcgctccttccatgatttgtataaaacagagtgcgttctgttttttacttacttaatattaacaactagaaccggctttgtcaaccctcttttttgagatttttcattacagaccaaattcctctgccagttcattcaaatacatccaacgctcttccttctcttcgagctgctctcttactttctcctgctcttccatcagctcacgcagtttcactgaattcgttgcatttgcggcaatctgacgatcaagagacgcaattttttcttccagctttgcaatctcctcatctattgtctcatattcacgctgctccttgaaagaaaacttcaccttctggcgctgtccgtccttccagttctttcctttcttctgcgtctcctcttctgtggacttctctgccggcttaagttcagactttcctgtgatatctttgctttcctctccgaatctgcgtttcttcgcctctacgtaatccgtgtatcctccctcaaactgtcggatcccgccgtttccatccagttcaaagatacgatcaactacattgtccaaaaaatatctgtcatgtgatacggtgatcacgattcctgtaaatgaattcaaatagtcctcaaggatcgtaagtgtcgggatatccagattatttccggcctcgtcaaacaacaggacattcgcattctccgcaagaacaccaagaagataaagccttctcttctcccctccggaaagcttaccgatcggtgcatactgcatatccggtgtaaataagaacctctccaacaattggctcgcactgatctgtccgtcctttgtcgtcacatactccgcaatatccttcacgtaatcgatcacacgctgggaatcatccatatgctgttcttcctgtgcaaaatatccgatcttgatcgtctcgccgatctcaatctcccctgcatccggcttgagtacacctgcgatcatcttaagaattgttgatttcccacagccgttcggtccgataattccaagccgctgattgcgaagcacaatataactgaaatcatccagaatcttcttctccccaaaacgcttgctgacatgatgaagttcaatcgtcttcttgcccattcttgtctctacagaatcaagctccaccgtctgatccgtcacaggtgcttttcctgctttcaacgcttccagacgttccagtcttgccttctgctttgtcgttctcgcacggcatccacgcttcgcccattccagttccatccgaagaatactctgacgctttctctgacttgcaagctccatctcttccctctgcgccttcaattcaaggaatccggaataatccgcatcatatccatacatctttccatgactcagctccaggatacggttcgtcacacgatcaaggaaatagcggtcatgtgttaccataagaacagttccacggtaagatctcagataatcttccagccaggaaatcatctcctgatccagatgattcgtcggctcgtccagaagaagtacgtcaaagtctcctgcaagtatcttcgcaagaactacgcgtctcctctgtcccccggataaagtgtcaatcttctgatcccactgcgtgatcccaagctccgtcagattactttccacctgccagctctccgcatctgcatcctgaagtgcgtaggaacggatatccatcccctccggaaatgtcggattctgcggaacaaaagcaatcttcagaccattctgacgaacaacctgcccctcatccggtatttcctctcccgcaaccaccttcaaaagagttgactttccggttccgttaatcccaacaatcccgatcttatccccctgctgaacaccaaacgatgcatcatcaaaaatcactttctccccatatattttagaaatatgttctatattaattaagttcattcttttccctgctttctgtttttctgcatttttatcaatcacatcgcccttccagtataacagatatttcagacactgaaaatcttaaaaatttttaaattcatatttgaaagggttgagaaaacacggaaaacgttataacatagtgagatacatgcaatgacatggtttcaaattgaaagtgaggtaaatgatatgagcccgaagaatgatttctcagacattttcgatgatgattttgaagttacatatgaagaagatccggaaatcaattttcatacttctgaagatacaaaacaaataaacagacctgattctaacacggagacgatcgttatgaacgcagacgattaccgagataactttaacgattccgatgacagccagttcgaagaagtacttcctgaatatgacgatgattatgaagatgatgatgcagattatgaggatgattattatgaagacgattataacacttccaacagaagatcaaatcgcaacaatccttataatgattcatataataatccatataatgatcgtgactacgacagacgctcctccggcaggaaacgttctggtggcggagtaaaacttgccgcaccgatcaaaaaaggcggaaaggcattgtcaaggctcacaagcacattgcttcagcagctttctattgtgttaattctagccacaacagcatttgtactctacaacttttaccgtgcaagcacaccgtacggagatatccaggaggcaatccagacacagaagatttctcaaactctggccgcttacttatgtgtagctgccctcttcctgttcttcgaattcatctcccttctctggtcgatgacacgcgtccgcgtacgtgacggagtctccagctggagagaagataccggaagaggcctgtggtcttttatccttgtatttgcgatttcctatgccgcattcctcttcagcccgctgctccctgattcaccggaagtgatctacggagtgaaaggagctcttgatgtatacggttccctccacaatgtattgtttggactgtgtgcagccggagtcatctcctgcctgatcagaaaatacaaaagttccaattagaatacaatattccctttacaaaaagtgcacccggcaatgaaatcaattacgaaatcattgccggatgcacttttaaaatttatgggccagtctcaaaaaatacgatgcattaatccaaaatgatcagtgccataaacacaagatctgtatcccctgtattcgtcagtccgtgtcccattccatccggtgtaaatgtcacatttcctgctttcaccgggcggatacgtccattgtcatcataatttccttccccacgaagaatataatatgtctcactctcgttgtgatgctcatgatatccaagagaacatcccggttccagtgtgacttctgcatacatcttgcactttccgttcagttccttatcttccagaatgtgcttgatgataacgtgtccctttccaccagccatgttttcttttctctcaactcttaattcactcatcttcaattcctcctaaaacatttttattgtaaagcttatttgctacaatacgtcttttatctgacatttatttcatatagatcaattcatactctcttgttccaagaccgatcttttctgcatgtgccagacaagtcttgtactcagaattcggtgttgtattctcaaaatgatcatgatgatcgcagaaattctcttcttccatacgatctgcaagctggctgtgcggcaacggtgtcgcgctaagacagacatctgcacatgcctgatccagtgccagcggatcaaaagaggcaaacataccgatattcggaaggatcggtacatcattctccggatgacagtcacagttcggtgatacatcaacgatcagtgaaatatggaagttcggtcttccatccacaaccgcctttgtatactctgccatcttgcagttcaataccttggttgccgcactgtccataaacgaaattgcatcaaagttacatgccccgatacatcttccacatccaacacaatgttcaagatcaatcgacatctttcttgcatcagcatcataaatcaggccgtcattcgcacactctctcagacagctcttacatcctctgcaggcttcctgatcgatcgtcggcttaccaacagaatgctgatccttcttaccggctctggaaccacatcccattccgatattcttgatcgtaccaccgaaacctgtcgtctcatgccctttaaaatgcgtcagactgataaatacatccgcatccatcacggcacgtccgatcttcgctttctctatgtactctcctccctgtaccggaacttcaatatcatccgttcccttcaggccatctccgataatcaccggacatccgacactcaacggtgtaaatccattctcccatgcacagtaaagatgctccagtgcgttctttctactgcccggatatagtgtattacaatctgtgagaaatggctttcctccaagctccttcacgacatcaacaaccgccttggcataattcggacggagataactgatattccccatctctccaaaatgcatcttaatcgccacaaatttattctccatgtcaatctcactgattcctgctttcttcatcagacgtttcagcttcgttggaagaccttcgccaagcttcgcccggaaatcagtataatacacccttgctttttccatgatgtaaacctcctgttgtaaattctgacagcttaaccctgcattcttatcatacactataaatctgactcttccaatcatttttagaaaaataataaagtggacatccccttgacgatacggtatactcaaattatcaattccgaactcagcagcagttcgatcactctgaaggagatgtaatgatacaatgaatcatctggctgttacctcaatactcactgttgtagcacatatcatctggtttgcttctatgacagaacgaaaatatccgatcaaaaaaacggttctgctctatggactttacgctatattcttcactatatgggccatacttgcatattccctgcttggcaaagactctccgtatgtgattccattttcatttgtcggaaccatcctgccagcaattctacttttcctatatacttcatctgatagtttcagcaaaaaaatatttttgatcgttacttatgcaaatttgttctgcatcatcatttgcctttctattttaatctgtgatggattatttccgaatttatccattgtaaaacagatgtatatacgaagcttggtacgaatactgttgaatattcctgcaatcctgctgtatctgtggtttgcgcgtccttatatgcgtacagtgcccggagacagaaaacggacctggtactctatttccctcgtgtcctttctgtttttaaccgtgtttgcaacgcttatcaacttcctcatgcgtgatggtcataccgtcgaacagatgagcctgtttatcacaaccatgatgatttattgtgcagtactgtggattgtatttggcacgatccaacacatgaatgccgaagtgaagatggaactgatcactcaaaatgtacaatacctgcaaggacagcttgccatggccaaagaacatgcatcaaccgccaaagccatgcgtcatgattttcgacatcacatgcaaaatattgacctgcttctgaaacaacagaagccacaagaagcgatacattatatagaagaatttatccaaagcctggatgcggcaagtccgattgatttttgcccacatattacagccaacgccattttaaacaacttttataatcaagcacagaaagaaggaattccgatctctataactgccgacacaccggagcatataacaattgcagatatggattttgttgcgatcctttcaaatcttctggaaaatgcagtaaacggatgtatcgaatgcggttcccgggatgagatcacagtaaatctccgtataaaaaaggagaaacttgtgattgtgtgcagtaacccttgtaaaacggaccttgtgatcgaaaatgatatcatcaagccaaaaggaaccgggatagaaagtatcctgatggctattgataaatacgatggaaatatccgttatcagatggaagacggtattctgacagcatgcgtcatccttaactgctgatctttgcagaaaatcagatcactatttcacgcagaaaaaacatggtttcacgaaaggaacacgttttttctgcatttttcttttatacttacacataataaaacattcttgggatcgttactcatcgtgacccaaatttatgaagaaaggatctgatttaaatgatgaactcaaatgtacaggctgctatgccaaaattcgccggattatcccatgtatgtattttcgtggataatatgatggaggcggttgactattaccagaaactattgggcgttgtaccggatcattacctgtcccactggagaaacgaaggtttctttaaagccggcggatttgtcaaagaagctgccgacggcgatgtctctatcgcttttgtaaatgtaccgggcacaaaactgacactggaactcatgcagtaccattcaccggaaggacgaaaagaacctgtcttcttcgctgccaacgatgtcagcggcgcacgtcatgtagcactgaaaatcacgaacatcgacgaagcatttttacatattaaatccatgccggacacacgactgatcaatgagactgacgattatcaggtattccagatcagcgagacctatccagatgaggttcatttcttcgatcaggatatgaaagaaatggatgaaaggaaacagcagacagctaaaatcctcagtgaagtgcggtatttctactttattgacaaatacggtctccaatgggagttcgagcagggacatactgatattggtgattaaatgaaaaaatgaaacaggagtcggtttgcgttacccgtgttgtacgcagcgactcctgttttttgtttatcttattattttttctttaccaggcaacgctttttatagaatgcaataccatagcaatgaatatgatcactgtcatactcgtcctcaaaatcccttgcatacattctttcatcaatttgccgcaatgctttctcacactcggattccagttcatctaccgaccttgcacgtttagcctcgaaaatagccacgtgaccattgatggtatcacagacaacaacatcacttctgccttctccatgttctttatttgaatccacctgatatccggctcctgcaaaaataccacttaaaaatgcatggtaaaagtcttccccataatcatggtaacttatagttcgccttaataatgcactcacttcttttgtgattttatcgcaatcttcattccatacagatgaaaacaattccgttctattccattttttagaactatcctcaaaccacttagaaacttctgtctcgaaaatttgcttgatttccaaattcggaattttcaatgccaccatgttgtcttgccagccatcatcaatcttataatctctaacctgcgttaaatatcccgtcaaatacattaagctccacagattttcctcagaagaatgtaaatagtcgtaagttaaattctcatccactctctgaataatatatccaccattcatcagtgtttcaagcttcttcgtaatgcttgcacccgcataatcaataaatgaacgaataattgcattatcacttgtatctttccagtattcatctggttttgcattaggattcttctgcaggtcatcaacataacacatcacatcccaggggcaataaacatcgacatctccgaaatgatatccatcataccacttcttcataatatctcccttacccttgatttctgcatcttcaagaattctatcaacttcgttttgaacaaatccatagtactcattcaatcgagaggatgtaatcgtgtttgagacaaaattgtttgtacctgtgaaaatgctttcctttgcaattttcagacaccctgtaataactgcaagtttaatgcactgattatcttttaatgcctgcataaatcccttcattatttcaagcatttctttataatagccattgctggttgctctcgccataggaacgtcatactcgtcaataagaagtatgacactcttattgtaatacttgctcaaaaactctgagagaatttgaagcgaacgcattacttcgattttccccgctcgtccataccgaatgtcatcaaacttctttttttcttctgcattcagcacagggctttccatgagatattcatgcttcttaaaaagctctccgacttcataaacaagctgcatatacgcagttgaaaaatcattcccctcaaccgccttaaggctcaagctcatcacaggccactgattcatccattcctcgcaaatatctctttgttttaaaatttccaaaccttcgaacaaaactttgctatctttttgaatatccagaaaacattcaagtgtactcattcccaatgtctttccaaagcgacggggacgagttattaatgtaacctgagtaccggatgacttcaggatttcaccaatcaatcctgtcttatcgatatagtaaaatccatctctacgaattgtctcgaaatccgatcttcctttcggaatatttaaaaaagtcatgtcatccactcctctccgacattttaccgctgcaactgcaaagatgcatcttgtcaaaaaatatcacgcgctccaatgtattttgattctaccatcttactggataaatgacaagttgtctcgtattctaacctcttcttttcatctgcgcttaatttatccaacacgtcatatgcttcttccaattcaaaatttttctttgccattttttcaaaatcctttctggtttttcctccaagaaagcgcatccactgcaacaggcttgtctcatttttctcttccggcggaagttttgacaattctaagatatgcatttctttcatagaattctcctctcttctgtgggatgaatgattgcctgaagaagagaggagaattctattattgcaagctgaattttttatgctctgatatttttttgcaatctcaaaacagctactctatatagcatatttctctgcttacagtagattgttttcattctttctttttctgccttacggaatatcattttgcctacctctttactcatgcagttccagcggcagtccgtccgggtcatggaagaaagtcatcttctttcctgtataatcgtcaacccgaatcggctcacattcaataccgacttccgccaactcattcaccgtctgctccacgctatcaacgcagaacgcaagatgacgcagaccacaggcctccggccggtttacacgcttcggaggatttgcctcagcgaaaatctccagttccgtgtgttcattaacacgaagatccagcttccagtccttgcgctccgggcgatagttttctctgatgacagagaaacccagcttgttcacatagaaatccttagctgcttcgtaatcagatacgataattgcaatatgatgtatttttgataaattcatttttctcacgctccatttcttttatttccatcacaaactatatagtgacctccaaaaagaccgtattgttaacttccagtatttttacgactcattttaaagatataccgatttattaatcaaatggtaactcctccatatttaactgttgctaacctctttactcatgcagttccagcggcaatccgtccaggtcatggaagaaagtcatcttctttcctgtataattgtcaacccgaatcggctcacatatctaattttcactcatcccgtagcaatatgcattcacttttacttcgtacttttttgttacttatttcttcgtttatacggatatctagggatgaaaatataatgaggtcagaccacaatgtggtcagccttggagtcatgtttcttaataatagtaactattaaacgacctcatcttctagcatttcttttaatccttccaataaacgctgtgctgtcacctttcccataacaattgttgccacttcatccattattacaccatcattatcatcagtaaaatcaggactacgttgtaacaatttaattatcaactcatctttttcagaatccatagcacatgaaaatccgtttacatattgtaacatcttatttacctctctttacatttcttgcaactcaaaattatttattatctttattgtattattatctagatgatttcttttagaattaaattgaagaatattacttttactaaattttttatcatcatccctagcaaatatatattccttcttctgctctatatagcattcctttgatttcctaactggaggtttcaaattaatatataattctaactctaatttctctgcaatttctgaaagtgccttaattgagaaattataatctccaccttcccatcttgataccattccctgactaactccaagatatcctgcaaattctttctgcgacattttcaattccattctacgcttaacaatagatgctgaaatcttacccaaatatctcgatgcattaatatcagcaattgaaatattatcatcaaacatagctaataaatccgctaatgaagtgctattttccttattttttttctccatactataaattctcccttttctagacttcctcaaatctactgtccaaaaccttcttatattgagtataatctgtttttttctttcctgcacgttcatagaatgctactaaaaatttaggtgtatctttttcgtcaaatgccatcaataatctaaagttaaaattttttcccgataaatgcaatgaataataatctctatcttgattctttattatttcattactatctgctttacatacatttgttcccagttcctttaaaaaatttaattgttttactaataatgtgaaaatttctttttcattacccgtagcatttttaagcagtacttgaaactcatacataaacttgggatgaaaaacatatcccctttccgaacattcttccaaatttttaaccagttccgctaatacctgtttcttattcatataaatattctgatttgttaattatattacttatatgtaatataatcaagtcatttccttcctaattattatctagatttttatgtgaatctcacacgactaaaatcttacgcttcccatccactttaaacaataagactaactatcaattgttacctggtttccagatataggtagtccgccacttttacatcttatttcactattcattcgtttatacggatttaattggtaaatttttatgagagctcttttagtgcttccaaatatccgatcaaccttttctgtgcatttgtatctaatttttgatatatttctaccagcattccgatttctgtctctttactaatttttctcatttaatattttatactgacgcagaattacccgtaccctatatgctgcaaatcttttcgctcttttataaaagataacagtcaacatagccatgataaatgtaaccactaaatcttgcctgctaaaactgaatgattttatgttgtatctataataagcacttaaacataacggcattgatattattaaactacgactcatagcatataatgaatttattttattagccttatcacatttctcatgtgtttctaaaaaagtcttacataaataaaatacatactcattttcagtttcgttataaacctgatcatcgtttgatttatttaatattttgtttgcaagctctctaaaagattttaattccaactcattaccaataattttattttcatcattcaaaaatttacaccttgcattttcacgaaatttgaaaacctttttatcaagaactgaactaatctcttgtaaaaccaatcccaagaaaaagctcccaaccaaaaataagatagcattaacaatgtcattttctacatttgctattaaatttatcaatggtaaatcaagacaacaactcacaacaattactatcattccagataacagtactccaaaaaaatcatatactccaactttatctaatgcactattcatttcatttatctccttttaaaaacttgttttttaggcgttttataaacaccacaagtccttgattttattggttttctcactgtgctatatacaaatcttttagttcgtccaaaacctgatccttcattctccctaccagccccaactgcttaatatcaatgctttcgttttgcatcttctgaataaagtcctgaatatctgcataaactccttgaggagccgtaatcttgaccatgggatcaatcaattctgtcaggcggaaaacatcgttcttatgcttcttgatgtttttgctgtcaacatgttcacctgcagccttgcgatctattaaatccatccacgcttttgccttaaatggaatcaaatatgccgcatccaagacagtaactccatcaacagtgactttcccctgtttcaaaaattcgtagtaatcatcgtccaaaagaatagcagacagacttgaaatatcttcgtctattggtagcggtgtcaaaactgcatcttccggaagttgaatggcatccagctttcgcgtgaaaagttcaatcatcgcaggatactgattcgagactgggtggctaaaacgataaaactgcggcacacccgaacttttattgcaatgttcatatccagcccgttttacatattcccaaaatttctttccaaaattcgcatcaactgcttctatattgttcttcactgctcttgaaccattccttaaaactctcaatccctgtaaccatctatcttccttcacagttcattcagcatttcttctactgcttcttcaacccgttcatccgcatcttctctcaatgccaatgccagcgaaagttcgtccacagtatttcgtgtggacaattttcggggattatatctccacatttctacagccacttgcacctgtgaattttgcaaacggtttgtcataacatctttccatagagagattctttctgttgcatagtatttgacgttcagtgcattcagcatggaacactctgccaatgccgaatatccactttctagcaaagctgtccccacaaattctttcggaatataaaccgttcgttttattggattcagcaacttatctcctgctttttggaacagtattttcggagaatcctcggattttaaaatccgctgtacacctcttttctttatatgcagcaatcccatttcttcaagctgtttcgatgctctcgatatagaagtaggtgttaattccaagtctttcgcagcctgacttgtggacaattcttgtgcgcctccataaatgaaatgcaacagaagcatctgcgccgatggacgcatttcttctcgttgttccctttcggcattgcaccactcctgcaaatacaacgccataaaaggcaaataaatctgccttccttctacaacaaatggaattttctcacgaagcaaatattctttctgccgagaaataatctctttcagcactagaacaacaggcaaattttcatttttctgtatccaggcaacgtgctttttcagcactccaatttgctccaattcagttttcggataaaggaaaatcgcctttttcccattcatagatgccatctgcaggcgataccgcatgacaataaagtttggcaaatgcttgaactccacatcctcataagttactttgattccaaggactttattgagatactccatgtgttcacctccatttttaactctttttaagttaagatgcaatattaaagttaagataaaccacaaagcgctgcatggtaaggtatttaacgcctattccaataaagcctccttgtctctgcatctgaatattccctctccgctataacagctatcttacctcatacttttttgtttactcatttcatcatttcttcgtttatgcgtattatataggtaaattttttatgaaagttctttgagtgcttccaaatatccaatcaatcttttctgtgcatttgtatctaatttttgatatgtttctaccagcattccaatttctgtctctttactaatcacataagtattattatccctgcttctgtttcctgtatgctctgctcctgataacagctcatatggtgtcacatccaacacttcgcaaatgatcaaaatcttatcacttaccggatttgttctttttttcttccaatcacttatggaactctctgcaattcctgttctttgggcaaattctttctgactcattcccttttcttttaataattcaaaaatcttatcactgattgttttcattccttttttccgcctcttttctcttaccagtacctacatatatagcaggtactggacacttaattgcttttcttattttcataagtctatcacttcatatgcgatttgtaaatgcgaatttatttgtttataacaatttgatagggtcagaccacaatgtggtctacgacgaaaaaaacaaagcaataggaagaacacattttaacaacaaaaaagtcgcattctaataatcaatagtttttaacatggcttttccgtgaagctctattaaagtgcgtctttttttctaatctactttcctcttttcccaatttcacaccattggccctacagaaagaattcctcgataaaacatccgtggtttttgacgacacacgagaggataatatgaaagaaaaactcgctttagagcgcaagggaaaacctgacaatgcaaaccgtgatcatgtacaactacccttttgcaatatcctcatcaaatgcctgccgaactgcgtcttcatcatacattgccacaatctgtttctctttcagctttttcttaagttcctttttcgataatcccgtcagtatcctaacatcatcaaacgtcagataactcttaggctctccaaagctcatcattgcttcatctagaggatcaaccggggactcttcctccggatgctcctctagatgaaaggcaatataaaatctctgtgtactcttcagataaccgcatagcctttggtaaatataagtgattgatcgtgcataatcttcatccggattatattgaaatgcatagtgattgatctcaccttcgtcatccgtcacaatattccccctcacaatttcatctttcaatttgaaatatgccagattaatcgactcttcatctgtcagatctgcatctgatcccacctgcatgattcctactgttgtatgtcttcccgaccgtacttttattctctccagttttcttttgaatttgcctctgttataattttcaaaaatcatgattgaaaaaagcaaaatccagatccggttatcgttttccgtaatctgaataatatctttatacttcttgtaaaaataattaaatcgattactgatatatttgtccagtcttgattcactcgcgacctttttctgtgtatacactttatcaagaaaaacagtcataaatttgtataccacagcaattacaacgagccagaattcattcacaagttcagaagccggtataaatactttttccggttcacagagaaaatacttaatcagaaaacaggctactccgattcccaataccgcatttaaaagttcatatcgaacattatacaattctcttctattcagtaaaatacaaataagaaatgcacggtacacataatatgctaccacgtaaacaatcaagaattttctgccaaaggctaattccttcacgtgatagcaaaacattgacagaaggatcaaaatgatattcggaatcaagatattcattaaaatatttgttgacattcctttgtcctgatccgcgcgaaatgtaaataccgcatacggtcttccactatttgtgacactgtgtaatacacttccacaccaggaaatagtatgtacggtaatggcagcaaggagaagcaggaataacaggaaaatccagtctttgagattgtatgaaaatattgaggttaaaatagtgtttatcatttgtgtatgcctttttccgtaaagtttataagaactttaccatattaatatatataatttctaagattcaaaaatcattttatttaaaagcaaaagctatcgtatctaatatatctttcattggaccttttgacaattttctacatctccttcctccacattgataaacaatattcctcaaaaaatccctctttcttttccacagatatcgctctatgcaatgcctggcctgattttgtaaaaagtacattccctactcttaccgtttttgtttctttctccatctcatactctgaatcaaaataatgaacctttattggattactctcactttcgataacatatcctgctgctatcgagactaaatctgcctctattaaacctaatgcaatcaaacttataattttatcgaatgttattccccactttttatattcatctaatctgtggcaccaaataaccggctcatattcatcatctacttttactgccaaagaacacaatgtggtaaatgtctccgcatcttcccgatccatttgtgctaatgtatataataatttttttggtatactgttattatcattacactcttcagcaagaatctttccccatatactttgaaatacttcatccgaaataagtcgtgcctgatccataaataaaacaatccaatcgtcatcgactttttgtggattagctccttcccttaattcattaattgcaaatccaactacatctttctgattacaatattcttttatcgtcttctttgcctgactaatcaatgcagccttaagcaatgagtcataatcactatttttaatatcctcaatatatgtagcaattgcaattctttcaggtgtctctctattcactccccatcctacagctgttcctaatttatccaacaaattattgacaacatctgcagcaccatcaatatctaatatactatatttatttatatcactcattttttctgtccttctttctatttttcctctattttagttctctcggtttcatttttctgttttattttctttctaacagtttttattatctgaattataataattcctaaaataacaatctatgaaaaatattccaattccttcagccctgatttcatcggcatttgaagaaattcttttctttttttacaaaaaagtacttgacaaaacctcctgaaagtgaggtcgcttcgcgacctattaattaaggaattgttcgtctcgccacgaaccttaattacactttaggaggtatgtcatatgaatcgaattgacatctgcaaaaatatcatccaatccattaaggagtatatcacaaccccagaaaaactggaacctcatcgtgcgaaaaatcattttattcgcaaacgaaagctttctctttttcaagtaattatgtatctgctttacacttcaaaggcctccatgtttcaaaatctttcccgtattcgggaagatcttggaagccttgatttccctgacatttcaaaacaggctctgtcaaaggctcgccaatttattaaccctgacttatttaaagagctctactatttatcagttgatttattctataagcagttcccatctcgtaaactttggaatggatatcatttatttgccattgatggttctaaaatagaattgcctaattcgaaatcgaatttcgagttctttggtgaaatgtttggatatcctgatccaagccgccgttttactatgggactttcgttactgtgtcgagcatcagcacctttgtcttatgcgcttaaaacataattataacattgctaagaaatgctctggagacataatcacggttcttcccggcaacgaaaaagacgggactgaggatatcaggataagagtcatcgaagttattctcagtgatggaacgaaagagtatcttgccaccaatctttttgattcacatatttctcaacagatgttccgcgaactttacttctatcgctggccagtcgaaacaaaatataaggaattgaaaagccgccttgctattgaagaattttccggtgcaacgaccacttcagtgcttcaagaattttatatcaacgtacttctttcaaacctgtcatctcttattaaaaatcaagttgatgaagaaattcagattaccgctaaaaatacaaataaatatcgataccaagcaaaccgagcatttattatcggacgtgtcaaaacaatagttcccaaaatcctgtctaatcttttcgatttatctgtacttgatatactatataaggaatctctcagatgcagatctcagattatgcctggaagaacattccgacgaaagaagaataaagcaataggcagaacacattttaacaataaaaaagttgcattctaatatcaatagctgttaatagggctttttctgtgaagctctattaaagtgcgtcttcttttcaaatctaccttcctcttttctcaatttcgcaccgttagtcattaacctgagcaggcacttgtcttaagttgacattaggttgatcacattggtgcctgacaccaatgtggtatcgttatcaggctttacccaaataaagcttccgttttcttagtaatttatagtctgtccgaaaacttacgagaccgtttcaattctaatgctcataatgaatttttttcaagtaatttctgcacgttttggataaatacctctgtatgtgcaatagaaaagactttattgctctccaaaagttcatttttcaattcttccaattttttcaacaatatttgaaaaccttgttgtgtatttttcttatcaatctcagctataacatgccaattttcccatattctttcaaaataacctgggaaacgacacttctcagcgttattacacctttcgaatgctttcaccgtagcagacgccatctcatcatcaaatgcattaaaacgattattctggcaaatgtacaatgtttccaatgggtcttttcccattccatctatgtatatttttctgtttctacaaaacaataaggtatttccttcacgaaattcgtcaataagcaaatacgttttccattcctctttgtcaaataaactctcgttttcttttgaaatgcaagtataaatctgctgtccttctggctgctcctcttttaattgattgatgcgtcccgctattccttctcgtatttttccccactcaatcttatttggaaatttgaacttatattgccttgcccacacactgttctgtatcaaattgacgtactcgtccaaggtaagttttccactatacgccaattcaataagttcaggaaatccattgtttacatcttcctcatctaaatccataattctatttacccgaagtaaatccgtaggtttttttgctttttcccgttctattctttcttttatttcatactgcaactgctcttcatcccaatttccatgtaataaccattcttcaatagctttcaacatataattacgattaaaatcagctttaactccagctttatatgcaatcacataacgtgtaaacgcatacaaccaccgttcaacatctgagaatccattcttttccaatataatataaattcggtaaaaatcagtaattgcgcacttaagacttctaatattatgtaattgcacattctctcctgttgaccttacacccatattgggtgcaaataattctaatagttctcgttcatgtttctctataaagccttgatactctttatcctgatatttcaattccctgatcacattgtggacaataccctcataatcaggtttatattgaaccgttctctgcacaatcttctctttaatttctgcatatgtaagctgaatcaactcatcctttgctttatcctcttcatttcgctctttatctgactgcatcttatctggattacatacaataatcgtataaaacttggaatttgtataactaaaatctcaactttccttattttatgcgacttggcggtatgccttgccactctatatgtatccttttcccttgtttttgcccttatgaggtatctacaagggaaagtttttcttattcgattttattctccaaccaccttatcaagtagtcgggctgagtttcgcttaccttctcggttagcgtgtgcatagacattcatagtggtacttacatccgagtgtccaagtaattcctgtacatcctttggtgctgctccatttgagagcaggtttgtggtataagtgtgtcgcagggtgtggaagtggaaattatcatcaagctccgacaatcgtttccttgctgtccttaaagctgtctcaaccgttgcaggggcttcgtatgctccgtccggtctgatacatacaaggtcaatctcgttgtaatcaagcggaatgtcctctgtgccatccaaatgataaagctcatagtagatacgattcttttccttaacttccctgtagtagttcctctgatagagttctccgtaactgaatacctgctttctctgttcctttttcgctttctttaagatgtcagcgagcgtatcacagaaatccacgatacggactttctttcgctttgtcggaccaatctcggtcttgtgccttgctccgttgtaacggacacttcttcgtactgtcagatactgttcctcaaagttaatgtcactccaagacagtccgcatacctctccaagtctaagacctgtgtagtacgctatctgtaccggcaggacagcaggcttgtttctttcttccagatactccataagcgtttgatactgctctggtgtaatcgggttgataacctctgcatcctcatcattatcagaaaacaaatccacatcttcctcggctttcctacgcattaccacatactgcattggattgaatgtgatgtactgctttggaaagactgcaaatcggaaggactgttgcaggactgcgtggaaagaacggatatagtcgatggtgtaaccctttgacttaaaatttccttcctcaccgccaaatgcaagtaaatccataaacttctgcaaatgctccgaagtgactgtctttagttttctgtttccgattgggtgttgtttaatcctgtttactgcctgtaaatagttaccgactgtaccgttgctaagtgaacccgttttcaaatcttcctctgcccatacatctagcatctgtccgagtgtgaggttgtccgctttggctagaaatttctttgcgtcataatcctccatagccttgcgtaacattttctctgtctctgatttgctctccgtacctgcaaattctttctgaaccaagttaccacttgcatcctccacataaaagcggtagtaccatttcttgcctttcttccttacagaaccttttgccataatcgtttctcctttcgatatcggcaatcggaactggtgaaatgcttcttgcgtgtaagtatatcatagctccgtctgcctatctataccgaatcgggatctttttctgataaaagattggctagtcgatttttcgctgtctcaggattcttagaatacagtcttacaatatcgcccatatcgttcaatgcgttgacggtgtgggtgatttctctaaggaacataatctcattgtattccttattggattcaaaccccattgtctgggcgagcattttgttatctgtatttcctttgaaattcttacaagcgaactggaacgaatccacgaacagctcgtattcccgtaacatcagtagtagcaggtctttggaaaaatcactttcggactgttccatatcataagggagcttattcagaatggaagtcatcacatcacgaatctgtaattctcttttatccgtaatgtctgtttcgtattcgtccgtctcacctttcagccattccacagatacatgaagtgcatctgccagaccttctaaggtcattttcttggtgttatcaatcgttcctgcttcgtatctctgaatggttgaggctgtcacgcccattttttcagcgacataaggctggttcaatcctaactcctgtctacggctttttgctctgctaccgattgtctttcgcaattctttatcttttaacatacttgcgaacctcctttttcggtatgtcattactataccacataacacgatatattgcaatacgcaattctataaaagatgatagaatttcgtaaggcttgacatagcgttataaaagatatatactttaatcagaattgcgtaacgcaagttttaaaaaaggctaatcctttcttcaaaaaggaacatcctctgatatacaagacttgtaatcctacgcaggaatgaggtgatcgaatgacagaattaaagtttgctctctccattgaagaagctgccgactatacaggtatcggaagaaacactcttagaaatcttgtggaatgggaaaagctgcctatccttagagtgggaagaaaaatcttaatccgcagggaacgattagacgagtttctgattctcaatgaggggaaggatttacgagacagacacgcagtaaaagcggtcaagggaacaatgaaaaatgaataagggacagtcctaagaccatccctctggtatgtatctgactaaaagccatgatatacctacacgcaaatagattatatcacggacaagtcctcagatacaaccagaacttttggaaaatgaggacaagatggatgtgaatgggtgcaatcgtccacccagttatagcttgttggtaggacaagtccacccaagatgcaaaaggtgttatgaatagtccacccaagccagaaaatgaagtgggtgcaaccatccacccaagtgaagccgactggtaggacaagtccacccaacttacaaaaagtgctgtgagaagtcataccaagtgtagctatgaaaaaagctgtccgacctatgacaaaaagtgtacgctactatgattttgagtgtccaatctatggggtacattttcaaagagttaatagtaaaaagctctattaaaatcaaaatgtaataaaacaatgcactattaaaaatgaaatttaataggaacttttactaccacttccttgccagacacagtttaaaagtaagcgaagtaacacaatgctattgtcagggcaaaaatgctaacgaatcgtgctattgttttttcgattttaatagcagacttctactgtttctacggtttttgctaaaaagtctgaataatagaacaatgctattgttaaggcaaaagtgctaacggattcgtctattgtttcgctgattttcatagcaatcttctagcatttctgttaagaaaagggagtgccggatacggcacataaaaagtgtgccattaaaggcacaaaattaggtgctgagggaacagttacagctaaaagtgaacttcataagcaagccctcggcgtttgagagcgaaatacacccatcgcacaaaacttcgttttgtactctgtgtatttcgctctgcgaggcttagccgccacaaggcggatgtgttcgcaagacgagtgcctatgcactcgctcacagggaaagtttactactcacatctcatctatcttatctgtcctcttttccaaaatcaaaactgggaaaggaggaaatcgctatgccaagaaattcatttgtgcagatgtcaaagctccataatgttcgtggaagaatctattatatctccagtgacaaaaaacaggaaaatctctatgcggtatatgaaaccacagaccgaaaattttggacagaacttgccaagtgcaatcaggcagaatttaagaaaagcggtacagagggaaaatgtatcgaagcaagagaatttatcattgccctgccggaatcctttgtggattatccgccagacggactattaaaatatatgacggataaattcaaaagtcggtatggtgttgattgtattgcagcactccatcataacaaacgaaagacgaattatcatatccatcttatctttgcagaacgaaattatcttgacgaaccgatagaaaagattgccaccagaaatatgttctatgatgagaaaggtaatcatgttcgtaccaagaaagaaatcctagacgagaatggaactatccgtaaaaggtgtaaggtgatcaagaaaggtgaggtctacgaaagacagatgtttaccatcaaggacgctcgctttaagcaggaacatttcttagatgaggtcaaggtattttataccgatgtcatcaacggacttgtcaaagatgagaaagaaaagctgtctgcattcaagcgtggggatgtctatcttgccactaagaaaatcggtaagaacaatccaaaggcagataagattacactcaataataaggtcatacaggactggaatcgtactgtggatcacgctttggtatcggggatggagcgaaaggaaatcttaaaggtaaagcaggaacagatttcaactccgattaaggaatccattcacaagtatggcaatcatccggagcttttgtttatgattatctttcgggcaatcgagctgttaaaagaactcataaagttgctgatacagaaacaggaacaacagaaagccagaatctccgaccttatggagcgaagaaatgaaaaacaagagaaacaaccagctccatccgttacacagacagacaatcagacaattcctgctgtgacccaaccattcaaagcacctgctactactaccgcagaaaagaccgttattccgccaagaccaagaatgtctgagctggcacacgattatgagatgcgacttgaagagattatggagaaacttaaacgacaaaacagagccattcatacgcaggaagtgaaaaaagaccttattgacgaggatttgaagaactgtacaggattattccaaggaaagaaacgaaaggaattgcaggcacagtctaacaaatacgcagaaacgattaagattatgaagcagggattatcccatatcgtgcaggattacaaatatccaacggtagatgcgttcctgcaagtctataaacaaggcaagtccgagtatgaatcctatgtcaaagcaaacaaggaatggaactccaagtatggagaaaactcaatccatcgaaagctggcagaaaaacaggcagaagttcagaaacgggaacaggacagagattttaactatcgttcgccatcagacagaggagctagataatctaattaaattcaaaaaagataaagaccatcaaattctttatcttttttgaatatttatgaaaagtcatcctgctatttaaagtgtctcattagatttttaattgtttcgactatcataagaatgattacgcagaaaaaggaataaaacaatgtggtattcatcttcgtgtttccaattttataaaacagcagaaatccaatgctaacaattatcacagaaataagtttatgtatccatttttgtttggtggttaaacatattttatggttacttataggtgcaaataatatacacataaggacaagtatcaaatatcctagtacagttggctttaaatagattatagcccacttatcaagacaaccgagaaaaaagctgcctaagatacatgttaactgcgttggagcatgggcacctccggtataatgtcgtaacaatgaaaaggtaattacccaaattagggtatagccgagtgtatgtgataaaactccccatacgaacaataacactatggttataaaagtattcaaaaaacattctaagccatatatgtatatttctaattgatccgcagaaacatcctccccggatagttctgctaacttattagcaatagatgtagcccacttcgtaatcattcaaaatccccgcttgtatcaaatcttgttgtatatttggcaaaagcacttatcacgtctttggaataagaacgtgcgatttgtgtagttagatgatttgacaattcaatcgttcctgatgtaatacgatagatatgtgccatatttacaatataagaacgatgggttcggataaattcacttggcaaatggacaataatcttatttagggtagacatttgttcatagcatttgccgtctacggtcaatatatccacataatgtaatctgctcgaaaatgtcaatatatctgcatagggaatacttacaatttcctgcttgtttcggtatatgtaggtattattagataactccttcgcgatttcatccaaacacagaaaaagagtattttccttgacgggttttagcaagtagtttaaagctctgacttcatatcctcggaatacatattctctaaaagctgttaaaaatacaataataccttgataaccagattcacgaaggcgtttagcaacctcaattccattcatttgccccatttgtatgtcaaggaaaaatgctgaagcctgtatagttgtgccttcagaattttttgaaaaatattcttcgcccgattcgtattcgtcaatttcaatatcccaatcatattgctgcccgtattttcttattccatttttcagccgttctgattcgatcacagaatcttcaagtatggttattttcattttcatagtagtttgttattctccttatccggtatcataatatgtacggaaaaaattttgttatcagatgtaatctgcaatacgccatctgccttttctacaagctcttttactcgtcttatcccaagtccatgttcttttccttgtttaacactcaaaatgtctccatcaatgctaccttttatcacaccatcataattattttcaatgtgaatcagtatcatattctggtaaggtttaatataaaaataaatgtatggatgctcggttggatcagagattataagtctttctcctgcttcaatggaattattccatatatttccaagtatggatgaaagctcaacagaatcaagcggaaaattttcaggagccataatagaatattctgtcttaattccgtgtttttcagcataatcaagttttgcggtaagtatgcagtcaatagcaatatttcccgttgctatggcactttgcgtagttgcaagagtgttatggtattgctctgtatatgctataagttcatcccatttcttgtcttttgctaatacgttgattgcatccacataaatctgcatatcatgtttcatttttcgtaatcgttcagttgtctcagataagctattgaactcagtcctttccagctcataaatcttttgttcttccagtaatcgtatgttttcttcttttgaataacctagctggtatatgtatagcatcaatactaaaaataaaataataaaaaacaagtcaaccaatgatagcctagctgaaaaggatgaatcaccaaatttatcaacagattccaaagtcagccttaatatgtagtgcccgattgcaagtccagaaattgcgatgaaaatatatgcaactttttggaacggtgaaagagatatgtctttgtttccaatagaatgaaataacaagacaaaaacagctatcattgccaaatataacatggtatatggcttccgtaatgttccacctaataatagctccagagacgctcctttataaagagtaacgggaataaagaacgaaatctgttctgcaactaagcaaatgatggaatacgaaaagccccaaaagatacggcgaattatactatcacgatagaacaatactgcatatccaatgtccaaaacacaagatgacatcaaagtgctgtaggatgatattcccattttattcagcgtgcataacacagcaaactgaaatgatacgaaaagaaacatcaaaactgcttgatgtttataatttgctcgaatacgcaattttttatggataaatattataaacaatgccagttctaagaaattaacaatatattcccatattgagtcaatatatagcatagctaccacttcctttaatcattctccgtcatattttatcatcaataaagtaggtacacaacataatatgctaccgtttgtgcatagtgagctaccattcatgcatagaggtattgaaaagtataaagattttgttatattcaaggtatactactacatcttaagtattctgagaatctataatatggagtggagatgataagatgtcgtactttaggaatattaacaggatatataatgtgtactagtatgtgttgcgtttcaattttcataaagataacctttaagaataattgaagataaccgttgttacatgattgaaaaggagtgaaggagtatgcattttaaaaaatctgttttaaaaaatcatttattgtatagcattataactttaatggctatagcaatgctatttcctattacggcatttgcacaagcttatgtacaaacatgggatcttgttgattctggcaaacatctagactatgacggaaacagcacttacatgagttatattaacactggggctgccacatggaatgcatataaatctggagtaatcagaaaagacagtgcttttgttgtagaagatgtatacgtaagcgatgtcaatgcttcgaatggatgggcaggcatgacatattctagtggtaaaattgaactcaatacctattatatgagcggttatagtaatagtaaaaaacagaatgtagcgacacatgaattgggacatgcattagggttggatcacagtacttcaacagatgttatggatgcagcaattacgggacatactagtacgcaggcattatctcaaaatgataaagattcatatgatgccgcatataataattattaggggagggagaacgctatgaaaaaatcaagtatctatggtattttgtctattgttcttatcgtaggaatgttttttacaggatgtgcatccaaaaataatgcaagtcaactgaatacaaatgtatctaacttgccaatccaccagatgcacgcatcttttgtatatgatactgataacattcgcgaagctgttggtatctgtgattacgtatttgtagcaaaggttgtcagttgcgatggaaccgagtatcgaaatgttataacgactgaagatgaaaaaggaaatcctaaggaggtcggttcgccttacactaattatactattcaggttctcgaaaatataaaaggtgaacttattacagataaacctattcctatgattagcgcctattaggaaaacacactgtcaaaggggttcgtagcgggggttagcccgctactgcggtatcttccgtagtgttgatttcaatgtactcggcaatcttgcggagttcgtcagcaaatttgaatttcacgctgatattgccgttttcatagaccttgatatagtccacaagttcaaccaagatttcacggttgagggcttcaatgttctgatacttcataaaggctaccagtgcaggatgctcattgtccacaccgtttgccagttctgcgcgttcagcgttcagccgggtaagcaccgcggaaatatcagaagtctgccgttcatagtcagccttcatatcccggtattcctgctgggtgatttcaccgtctttccagtcctgataaagagattgcttgtagcgtgttatctttatcagttcccgctcttttgcagctatcagatcgtccagtcggtaagactggctttttttgattggagcggaattgatctgcgttacgatttctgagtaggaaacagctaaatgtacctgatgctgtacggcgaacagaacagcagcctccagccgttcatgcttgattgagtgcatggtgcaggctgtccgggaacggttcttgtaggttgagcaagaataatatacattgttgttcttgctaacgcatcgggtaatggcccgcccgcaatcggcacatttcagaaagccgctgaataaatgtacctcacggcctttcggggaagtacgggtatcacgctgtaagagagcctgtaccttatcgaaagtttcatagtcgataatggcctcatgtgttccagccacttccacccattcctcgcggggaacagcttcaatctggtgtaccttgtagcttttcacccggctccggccttgggctaagtccccggtgtaggtcggattggtaagaatggagtggatcatgcgggctccccacataggatcgtcataccctcttgtcgaaacaggcaagcccttttgtaccttgtaagccgaggggctcggtacgccgtgttcgttcaggtacaacgcgatagcacgttttgatgacccttgaataagcattgtgaaaatgagtttgacattttcagcagcatcgggatcaacaatcagcctgtgcttgtcctttgggtgctttacatagccgtaaggagcaaatgctccgatatactggccgttgcgccgtttgtaatcaaatacctgccgtatctttttggaagtctgatagcagtaattatcgttcatcacgtttgtaatgggaacgatgatatttgaaacgctgtcggggttcttgtagctgtccacattctcagcaaggctgataaagcgaacacccatttgaacaaacaggttgtcgatcaaacttccggcatcgctataatttcgtgcgaagcgggacaggtcttttactataacgcagttgattttaccactcatgacatccgccaagagccgttgaaaatcttcacggttagcgtccgttccagtatgtccgtcatctacatattccgtgacactttcaaactcgtcaatgttgcgtcggtaaaaatcgttcagtagatcacgctggttttttacgctgttgctatcgtcttttccttttttcaaatcttcctttgaaagccggatatagatgcccagccgccagcggcgaattgtgtaagagggagagaaactctgctgataccctctgttttttgctcgtgccattgttcctccttccctatcacattacacttatattataactctgtccggggaggacaacaaggatgcctccgcttcgggacactttgtctcgaagaagcaaagcgagctgtaaccgaagttacagcccgcttctttgccgcagcaggaaatccgtcagcttatcttggagagatggcccgctttcagcaaattcaattttcacgccaacaccaccgatgcaaaagcagtatggatttttgacagtctgcaaaaatcgagagatgcgctcctttctggaaagcgcattgtcaaaggtcataccgctcacatcaggcagggactcggcagccaccgcgccaatgtcaacgcttctcatttgttcaagttcctgtgtagttaatttcacggtaaacctccttcgtagattgatagaacgtctcccgctgtttggtggggaatcgcaacaggccagcaccaccgggatgctggcctgttgccttactccaccttgggacactttgtctcgaggcttattatagcttttgaatattagagagcgccgcacatatttacttggcctgtccaaagacaatcgttattttctgtgcggcgctctccaagcaagtgaattgacaagcccggaggaacaggcagccagtctgttcattgccggatcgtggccttgggatggccgggcccatttacgatgttggtgttgttcgctcaatctctttttggaaatgtcaccgcgcacccaccgtctggctccccgaacttactcagggttgccgttattcccttgcgttaggaagaaaacctcctctcataaaccgagacattttttcatcaattccaagtgggttaagatgaaaaaatcaaaaagtttttttcatgcgttcaaggccacgcttgaccgactggcgaatagactcctcatgtacgccctcggcctcggcaatttccttaatcgacttgccaagaatgatatgtgcgtcaattctgcggccctggatctccggcagagaattgagagcgttccacagacgaagaaaggtttccatccgttcaaggagctcctgcggggtcggctcatgcaggcaagcggaatactcaatcccgtcatcgcagtccagagaatactgcgccttgtgccgggagagccgccgctgataggccatctcatagcgggcatcggccttgaatacctcggccacctcgtcagaaacttcgataagctgatcctgcgtgtaccaataataaaaatctttcagattgatagtagtcatcgtaaaatcctccatttcagtttgttcggggttggtcggaaacgaaatggagtaacggcggagaacggcaccgcacctcgggacactttgcctcgaagtctggaaagcaaaatgcgcctgcgcgacacaaggccgcacaagcgcacgaaaaagtattatcggttatgtactgtttaatttcatattcaaagccggactgctccgatggaggggctacgctttttttagctggtgcagatcatggatactgcgaaaaagagaaaaggacacggcaaaataacctccaatcggctaccgtgtccctgcaagtcgtcattggtttgtgtagacgcaaagaaacggcggctctgaaaatcaaagccgccgtttcaaatgggcgtgtcaaattgtctgctctacgacggctttttttcttttgccgtcgtgcggcagatcatttcaatattcggttgaagtatcgttattcggtgttaagttctactaatacaacctctggacgattattaaatcggaatggaataatactatttccaaggccgcggctaacaaccatatttgtctttccgtctgtataaaggccggaatcatatttaggaaacagcccttgattgggggcaacgagccccccaataaaaggtaatcgaaactgccctccgtgtgcatgaccacataaaaccaaatcaacaccacagcatacataggtttcaaataactctggccgatgtgatagcagtatagtgtaactgttttcgtcatcaataaggctattcaattttgtgttgaccatggctggcgcttcattaaacatatcgcccttaatcgtaaagtcagaatcagaaagcccgataagggtaatcatttcgttgttatgcactaactgtattgcttcatcttcaaggacagttacgccagacgcttcaagccctgttttgaattgatcataatgtgagaagttagcttcgtggtttccagttacaaagtagacaggggctatttgaacagcttgttttataaaatcaaacgcaatctcaatgtctgtatgtccagcatcgattaaatctccagttatcacaataatatccggttcgtgttcagacagcaattctatcaattctgtgttgctttctccaaattcagcattatgcaagtcggacacttgtgcaatccgaaaattagaaaaggcagatgctatgcgatcgctggagatattaaccatacttaccatcaatgctgaattgccccatatagtatagattatcaaaaccagcagtatagttgttaatacacaaatcttcaccaatactctggtggaaaggatttttttcattttttcctctctttcatcaacttaattataaaaaaatcagcttacaaacaggtgaatttcaacttacgaatttgtaagacaaaagtgggcggcttctaaagccacccgcttcaaaagtagaattactgtgcgctgattgtatcaacaatggacatattgcgtattctcttaattggcccatgcacagccagaattacagagcttacgacaatcaacagaataacagctacctctggtaatggaggagtccaagcatccccccatctataacttatcaacattccaaacaatagcttgttacaaaacagtcccaacaccgtaccaactacaccgccgattatggtataggtgaaggcttctgcaacaatcattttacttagctgtcccatgctaacgccgatggcacggaaagcgccatactgtttcaaccgtgcagacacactcatggaaatactattgattatgttaaaaatagtaatcattgcaattaggacgaggaatccatagatgaacagccaaaaacaatagtaagttcccatggtactgctgttacccatgcgttcatcagcgaaagtaaatgaggaatctaccatttggcggatcacataaacatcttcgtctgttgtgcctttcactaattgcacatcaataaccgtatatttcgactcgccagtaatttgttcaaatgtatcctctgaacaaataattgttccaacaccggcggcactgtaaaacggacagtcggacaacattcccacgatttggatttctttactttgtccgtttgtattcaacgatacagtatcgcctatttgtattgtgttctgcgaattataaacaattaagcccgtccctaaatcagtttgcacagattccagagaaccctctaataaatagtcctttgcccaatcaaattgatactgctcataagagattaaatccatctttttttcaataccgtttgtgacagacggaacctcgtatgcaaattttcttccatacgctaaatccacaacaggattttcctttagatcatcaagtaatgctttgtcaatagcacaggcgttatcagggcttatgatagataaatctgctgtccaaggttggagcggtgttaaggtatgctgcatgaactcaactgttacagagaatgaaaggaaaaggataatactgagagcaaatgagcttgtcatcaaaaacagatttttccgatttgcttttgcatgataaattccaagtgctgtatcaatcttaagcagttgtgtattagcagcatttcttgcaggctccaagtcgtttgcattaccggaaaccgctgccaacggagatacttttgctgctttctttgccggagaataggcagcgaacaaaaccgttaccaagcccacaacgattcctgcaagaatacttggtacgctaaatccgaatgtaggcatcgctttgaaaaattccggacttaggaaacgcaaaatcgcacataagacccaaatgacaactataccgatggaaatacccacagggattgccaaacggcaccaactaagcgcctctttccgtactaagcgcataacctgttttggtgttgcaccaatacagcgcataaggccgaaaaattcggtacgctgggctacattgctgttcaggctgcttgcaatcatcataataccagctaacattaccagtacaaacaatacagccgcagccaagtaaacctgtaacaaaaagggaactcggctttgtccaagcaatccaagcagattgttgttggaagatatttgttcattcgataaattgcattgttctttcaaatctgcaattttcccttgtatatttcttgtgtttgcaaattgagtaaaaaacataatgccgtaatcattcggctccccgtctgatacattcggataaatcgcgcagtaatcctctgtgttcaaaatgatgccgtaggagtcgccactcatgatcgaggcggtattattcataaatcctgatatggtaaaattcagtttatcgccatcaggagtttctacggcaatgggatcaccaatcgcaacacccattatctgctttgcattttcagtcaccaacgcttcattacttgtctgtggaaaaacaccttcttcaagttggtcagtccagatttcagttatatagctttcatcacaaccgcatatcgctacatcttttccacccaaagtgtagcctaaatctccacgataattgagtacaccatacggtgaaaatacttcaatatcagggcgtgaagcaataattgctgcttcttcattgctgatattcttaatggcaatatgccaattcccagactcctgctgtgcctgcaaaatctggctgcggatgaacatatctgccattccaaaaatagttgtaaccagaaataccgccagcacaatgcagaaaatagacattctgctttgcttcttgtggatttttgcggatatgggaacaaggtcaagataatgcttcatttgtttttcctcccaaatccgtcaaaacgccatctgatacccggaacacccgatcaacggatgcagtcaaatccttattgtgggtaatcatcaggattgtttgctgatagcgacgggacgcctgcgtaagcagggcgataacatcctgactattcttgctgtccagattgccagtaggttcatctgccagaatcagtttgggctttgtgattaacgcccggccaatggcaacacgctgctgctgtccgccggatagttggctcggcaggtgatgtcgacgctcggtaagtcccaagagttccaaaatttcttctactgctgccgggtctggtttgcgatagtccaaaagaagcggaaacatgatattctgctccacattcagctcggaaaccaactgaaaggattggaagataaagccgatattacgacggcggaaaatcgtgcgctgttcctctttcatggaaaacaggtcttgttcatcaatccaaatgtggccggaagtaggggtatccaaagctccaatacagttcagtaatgtgcttttgccagaaccggattcacccacaacggcagcaaattcgcctttatccagggagaaggaaaccttcttcaacgcttcgactttcgcctcacccttgccataagttttacataaatcttgtactttcaatatttccatagtcatcagtacctcctttctcaaaaggatagcaaaaacagcttacaagcaggtgaatttgaccttacagatccgtaaggaaagatagtgtaaacagcgtaccttttccgacttcactttgtacggagataacaccgttttgaccctcaataatggacttggcaaggggaagccccagcccgattccttgtgtatcaagggaatgtttgctgcgataaaagcgtttaaagatatggtaaatatcttccgggactatgccgttaccattatcagaaataaaaatccgaaacatagcaggagtgcgctcccatgtaatacggacaataccgccagcttgcgtgtgatccagtgcattttttacaatgtttccaatcgcttcacctgtccattccatgtcacaaataagctgctgttcaccatcgccatctatctgaatctgcttgctttcgcttttagcccttgtggttaggtcattgactgaatgagctatcagctcggacacacggcaactttttttctcaaaaatgatgtttcccgtatccagtcgggttatcttcaacatggataagattaactgctccatacgctttagagaaatacccatcttcgccgcaaactgtttgaccgtttctgcattttctggctcactttcaatgatctcctgatacatagtgagggctgccagaggcgttttgagctggtgagatatatcggatatggtgtctttcaaaaactcttttgctttacgttctgtttcatttttggattggagcatagttgcaagctgttctatcgaagaaaacacttggtagatagccccctcataattctgcggtaaatgacaagagtaatccccgttgatgtaatttagcaatattttgtcggcctgttgatacaatcgcttccttttccagaaaaaaataaatattcctatggcaagcacaaagagaaaaaatagcacagtgcatagcatggtgcagaaagcggaacgctgaaattgattgaaataaggccgcatactgctttctgactgttttcccaaacccgcagccgctaataatgacctaccatcgtcactgatgtctgtgttcgtaaaggcaactgcaaccacttctttcggaacaccctgttccaaaagtgaggatgaaaccgcttcatcatgtttgagccataggacttccgcatcgttcacctgataaatagtcaaaacggttgctgtacctacaaacagcagagcaaacaaagtcaaaaatagcaggaaccctttaatctgtctatcttggtacaaactcatatagacacctctttccattggtagccgaacccacgaatggttataaggtgttctggatgggacggattggtttccactttttcacgaagccgccgtacatagacggacagggtattatcatcaacaaaatttcctgtatcatcccacagctcatttagaatgatgtcccttgtcacaacgcgatttgcgtttcttaccagcagacaaagcaaacgatattcggcgcttgtcaaatccaatgcttttccctttaaggttgcacggctacccaacagatcaatggtaatgtcgccacataccatagaagtgtttttttcgcttttggaaactccggcccgacgcaacagcgcccggatgcgggaacacaattcccccagtttgaaaggcttggtgatataatcgtccccaccgctatctaatccacgaattatgctgacttcttcatccgatgcagtcaggaatataatcggtatctgctgcttttcttttcttactctttcgcatacgtcaaatcctgttccatctggcagagtaacatccaaaatcaataaatcgtatcggtcgagttcggataagtattgttttgcttcacatactgtacgggcaacttcaacatcaaattcattctttttcaaagagtagaccaagccatctattagactgacatcatcctccaatagcaatattctattcatgttttaattccttcccttgttttgtccttccgtcaatcggcttttctgcgttctttgggatcagccaaacaccagccatctttacagcgccggggatacgcccggcagcacaatagtaatttactctacgaggtgtcacgccccatttttcggcggcctcttttagtgtcatataattcattctgcacctccatagagtatattatagttcttcgactcgaacaatacaagttttggaagaaaagaatgtgaaattaaatagtcagtagtatgaaatacaaagtcgttcaaataatatcacatgaaatgtaaaatcatatcaggtgatgttatgaagatagaacgagatgaaagacgctttgattttcacgatatagggctcgccatcaagcgtgcaagagaagccagcggcatgacacaggagcaactggcctatattgttgaccgcgctccgcgtaccattatgtataacgaaaatgatggtcagcatccaagcttcaacaccttttatcagatggtcacaatgtttgatatatcggtggatcaatacttttacccgtcccaaaatagcgggagcgagtgcagaaagcggattgatgccatgttgaacgccttggacgaaagagaattgaaaatcgttgaagctacaatccaagcgatgaaagcatcgaaagaaacggaggaaacgtaaaagaaagcgtaacctccgttttttttgcgccatgttgcgggttgcgcgttttggcaagcaattcgggtgtggccacactccgaaatttttgctggccgcaggcccgcaaaaatgcttgttggggagctccccaaacccgctgtacttcgggacaaattgtcccaaagtcccggtgcgttgcaccgtagtctgcggcccgtcactatcgttcctgggccttattttcacgctcgtctgttatgccgagcagatgatcaatgttcgcttttattgccacggcctcccgcatttgccgctgggcctcccggtattctgcataaagcgctttcttttgtcccgccagctcacggcgggatttttttagtgcctcaatcttagggagttttgcgccgttcagtatggtgttcatagtatcctttgccgcccggtaagtggcaagctccgcttcgtgctgggccagatactttttgctgtaccgcgcagccttgtacccatcgaacaccgggcgggtcttggcatagtccaccgtggcagccatcagctccgaggttttggaaagagcctcctccgctgtacggagctcgtcagacagcttgtgaaagtgatccaccgcagcctcggtgctggccgtcagcgccgcatagtctgtcagatgatgctcctgcaaatactggagcgcggcagccatctgttttaggttgtagaccttgacccatcgttcataggccgggcctttgccctgggccatacgctcttgaatgtcgatgatgagattgactcgccgtggcggaaccgtgggctcctctggtagttcagggagcggacgttccccagcaattaccgccttgatgtcctccgggtcaaatccggctccaagtgtagaagcccggagccgggtcggtttttcctgcccgggcgaaaggaatgagatgacaccgctgcgtccctgttttaccgcaaagccggactcctccatgaaacgaagaaagtcggcgaagtctgtgggctttttctccaaagcggcgagaatagccagccgtacccgctgcttggcagagggcggcttttccccgatccactggccatagtgaagaaagcgacccttgctgtgctggcgcgggttttggataaccgacagctcatgttcgatgcacacgcggtcagagagccgccgcagggcaaaggacgaaccaatgaaattatgaaatttccgggagcgatcaaaggccgtcgcattgaaataaatatgattgtggatatgggccttatcggtatgcgtacagacaaagaattgatgctttccctttgtccagcgcatcgccgtttcataaccgatacggtttgcttcttccgccgtaacctccccgggcaggaacgcctgccggatctgaaagaacagggccccgcgagatacggcccggcctgtctctgcaaggtattgactttttaccagaagaaactcggcgggagccgtgttcggatcgcagagataggaagatacggctcccagcttttccgggttcaggccataggtgaaacgatcctccatcgtttgaattgcactttttcccgccgctgttttataagggcggatgtaggtggtcgccgtagaaatccctccttccggcaaatagtatttttactttgggacactttgtcccgaagtagaaaaaaccggggagcggtatcaaccactccccggatgggtcagagctctaccagcgcggagagctgtttcaaaagatcagatagcggcccccacaacgcggcatagtcccgctgtaaggctgcgagttcttcgggataaattgcgccgtaggtgttggcctgaattgccacttggttcagattgttggagcatcgccgctggagcgaaaccagctcacgaaccggcgaaaggtcaacatgaagcacatacccactcagggccattttccgcatataggctcccatattacggatgccagcctccgccatacgttcttgaatcagagcctgctccgcctccgacaccatcacatgaagatggatcggacggcggcgcttttttgtcatcgctcctcacgctcccggctgcggcaggcgcggggcggctcctttaccttatccagcggcttttcctgttcgtctgccggaacggggcgcggcaaatgaaattcacggtgcaggcgcagcacctccagtacaaacaattcctgttcacgtttcttttccatatacgcacctccttatctatcgccacggtcaggctgcctccgttggggagccggagcctccgagccgcgatctgcctccgccaactttgccgcatttttcatctgctcggcaatcggacggggcctgtcgggattatcaggcgcaggacgcagctcatagtcggatgcctgtttttccgttagcgggcgggtataggtaagatagccccaagccaagaacgagccattttccaccgggatgcgctgatcgtaattgaaaatttcatccggcttgttataaggcggcttcgggaatgtcccgatgtccacaggccgctgggtcgaataatacttgtaaaggccgggagcctcggtctgcctgatcccgacgttataaacacgctgatagtcctgcacccggtctgtgaaatcctgttccatcgcggtgcggtcatttccatagtgaccccattcatactgccgctggccgtccttgtcatcatagcaggcccatgtgacatagcgggatggcgcggtgggatgttcgcccaatgcaaatcctcgtccattttccagcatgaccgccttcaaaatagcataaccttgatttttgtccatagtacacctcccatcatcgagacatttctttattttctcttttcacaaatggctggagctgataggggcttgtaccgtcctcgggccgcaaaaagtctatccgggccgcagcacggatggcgttctggttaagctgccgctgccatgccccttggctgggagcccacttaaagccgttgcttttcagttcctgccgctgatcggcatctggcttttcctcaaaaataagctgcaaacggttttcagcctcgttgattttggcctcgcctccggggaatgtccagccagcaaactcggagcggctgctcagttcctcaatgcgttggcgcacacggcggatgttggcgttgttgttggaaagcagataggcggggtatggcttgcttttgtccaagtgccatgactgcgccatatctgctttgagcttttcggcctgctccggcgtaagctccgggcagccgtccagcgttttgtgtttccgaaaatacgcattgaccgccttcatggtggcctgcagggactccagcccctccagcttttttgtcagcttttccacggccagatcgtcatccgcgctgatcccacccattccaacagagcggattttatcaagcagctttgaaatctccgcatactctccatagttgcgatcccgggcggcgttctgcttgtgcttttttatcacagggaaattgccgcccccggagatcagaatagagggcacccgggcatcaatcacattgcgttcattcagattttccgcaagtttccgggcatagcgatccaccagagcgtcaatcttatcgtggtacatgggatcgacacgggctttctggcgttccgccgctgcatacgcttcatcgaccattgcccggtagcccgccgtagcggagcccggctgatagtcggaaaagctgttcatatcctttgcccgctttgcggcttcttcattgatcggataatatttcggcatagtacctccttccacaaaagccggaactttgggacaaattgtcccaaagccccggcagctaaaatgttgacagcatctcacggaaacagggccggacgtagaaatatacgcctcccgcagaaaagggccttaaaaagtcttgtcacaggcgggttttggatgtcctaattgtcaacacatcagccccgttttttccgcatatattcccgctgctgtctgcggtgtgccgcctttgcacaggccgccgaacaataggtttgccgtccatcaggagccacggctctgccgcataccgggcaagccttgaaatccggccttggcccttctgccagcagcgcagcctccagcgccggatcaaggggcagaacagcctcgcggaagtagcggcaataagcccctgtccagcatttcccaaacatatagcactcgcaatccagcggcaggcagccgcagtcccggtcatagttggcacaccattttgataccagcctgcggattgccgctttttccgtccgggtcagttctcggcccacagcatcacctcccgttgcccggtggtttgagctgctcccggtagcagaacacgcagccgatcccgcaccagtaagggcagccgtcacaacgggagcccttcggcggcaggcttggcggcacacccttaaagtagcttttttctttcataaatccctcataggggttgttggtaaatctcattcattatcctcgctttcggtatcgtcctcgtcccaaggcggcccatcgtcctcgggatcgtcataatcagccagttcctcactgtaatcctcttcgggtacagcagctttttcatgcttcgggcggtagattttgaagtaccagcctgcaccgccgcccagaacagccactgccaagatcagcagaagcgtcccggtattacttttctgctggggctcgggttccggctcctccgcaggttccgtcaccggagcgggttcgggagctgtgccagcacactcggtcatgttgaccgcgcagacctcgcaatccgtatggatggctccgggcgcacatttttctgtgcaggagcaggccggaagttctccgccagcggcctccaatgccgccagcagatcggcttcatccaccatgttcaaaaagtaggtgtgatactgttcgccgtcctcgtccacaggcttgtcatagtcaatgacaatgtaaaaggtgttgccgccgctggtttccaccgtgatgaactgtttgttggttgcggcatcgtagagcagatcgcgggtcacaaggtttccatcctccgaaaagccctcgcccggggtaatggtaggcgctggctccggggccggagtttcttccacaacaggcggttcctcattcccgccgtccgaataggcataggacgggattgcaaagccgcataaaagaacggcggagcaaagccccgccgccaacatacgaaagtgtttcatattcagttttcctccttcttttcttcttcggacttcgggacactttgtcccaaagtaccaccgtccttcagcttttcaaacagcagcgggagctccgtaagggaaatgctcataccgcgcacaatgtccacgatctcgctgttttccgcctccagctttttctgctccagctccttgagccgggcctgctgttcactgattttggccttgaccttatcaatctcggcctgaattttcatgcttttggtagttgccatttcaaaacctcctgtcacggtaaacgcccgtaggcgtaaaaatgagattgccagtagcttgtattcaaatttgcgtagccgatgggatctccgcaatgcagcatttttccatcaccgacataaatcccgcaatggctcacacccggcgtgtcataggtgcctttgaagaacaccagatcaccgggtttgggagaactggtcggcgtacagatgttatagagcccctaggctcccagcctgcccacattccagccggagtgattgataacccacgaaacgtaccccgagcaatcaaaggaagtggcgggagaactgccgccccacacatagggatagccgatgtatttctgcgcttcggcaagcatcgcggcaaaggtttcatcgtccagatattctccgggcacttcgtaatcaccgggtttcccggtaatgtacttgttcacatagggagaatccgggaacagatcggggcggtttcccagcgttgccatatagatggcataccgtgaaagctgctcctcgcccatgacatatacgggcacatgggataaatcaaagttctccagcgtgaccgtacagatgtaatagtcgtaaggcacctgataggtgtccgtatgggagttgccgtccgcgtccgtccatgtgtcagtttccgtgcgataccgggtttccaccactacatcctccgtgagaatgtactggcggtcaaacagcatttgcagcgttccctgtacttcgtctattgtccattgcccctcatggagcgcacacaaaagagaaagcagcacataggggtcatgttcgatttcgtccagatcgaagtggtattcgtcatagtcatgggtgctttcataggtgtccagataatgctgcaaatcatcttccagcgcacagtaggcagcttcggcggccagcatatcccgatcctcgcaaggataggtgctggcccctaatgcaccggccccggcgttccccagcataagcatggtagaggaacaggactgcatagcaaacaggagtaacacacagagcaccgcaaccacggcacctgcgggatgacttttgacaaattccactgcccgggcagtcaggcgttctgtggctgtggcagttttcccagccgcagccgcgccctgctttgcagcctcctttgcctgcttgcggtattgtctgcgaagccgttgcttttgccagtagcgggtaagggcatttttcgtcagctccgggtgctcctgtgcggcggtgtgaaaatggtagtccgccgtgtatttggtatagcgggcctcggccttgcgtaccacttttgccgggtgttcccggactttacggcgcacaaagcgggagccgtgccgcagcgcggtttctcccacaagctcagaacggtgtgcgccttctgtgccgacattttcctgttccacttcaaaaatcttgccatgcacgaagctgtgaacggaaccactggcaacacggcctatgcgttttaccgggccgggctttttcggcggcttttgttttgccagcttctcccgggcctgttccagcttttcgccttgggactccatgtggagctttgccgccgcagcctgttcctgctggctctttttgcggaacttggacttcgggacactttgtcccgaagtgtcggaagcctccggcccgggctgttccccgtcaggggcgtgggcggtctgcgaccaagcctcctccttggtcttattcgtttttcgtttcattcttcatatcctccgggcgggtagtcagcaggtcatagatttctccgcgagggaaccgatccacaaacggaatggttacatttccatagaacaacagcccctcgccggaattgctgtgtgtgatataggaaagctgatgctcggaaataccgagctgttttgccagaatggtacggtcactctgcgcctgcgaaagcagaatcataaaatccgtgttgtccagaatgttctcgatttcccggctggccaaaaggtctttgacgttctgcgtcaaagcagacggcacacatccttttttacgcagcattttccagactgccacaaagtagctggctgtcagcggatcgcggagcaggatatgaaactcgtcaaagtagcaccaagtcgccgcaccctcgtggaagttctgatccaccgcctgcgaaacaaactcatttgtgatgtgcattgcaatctttctaaggttttcgcccatgtttttcagaacgatgcacaccacacgactgtccgtcttgacgttggtaggatggttaaagagattgagggagcctgtgcaataaagctctaaggcagttgccacgcgccgggcttcgggctccggctggcgtaagagctcttcgtacaaatcctgcaacagcggtgtttttgcagtttccagtccgagcgcctgttcccggtacaccaaacgcacacagcggtcaatgaccgtcttttcaatgggctgcaagccttccttgccgccgaccaccaactcgcatagggacaaaagaaaatccgccttcatggaaagcgggctttctccggcggccatattgagctccacatccatcggattgaggtggtgcgggctgtccggggcaatctcgatcacctggccacccagccttcgcaccagcggagcgtattcgcccatcgggtcaaccacgatgatccgatcctgcgggatggtgagaaacacattcaagagctcgcgctttgcggcaaagctcttgccggagcccgtagagcccaaatacatcccgtttgccgatttcagctttttgcggtcagccatgatgacattgtgagaaagtgcgttcatgccatagtagagggcctgcccagccatgcggagctcccttgtcataaaaggaataaagatggctgtggagctggtggtcataccgcgctggatttctacctcgttgtaaccaagggccaacgaggaaacaaagccctgttcctgttgccagtccagacggcgcagagcgcagttgtatttctgcgcgataccgcccacggtaaacacatcgttttccagccgctggcggttaggagcaaggtttaccaccgtaaaggtcagcagaaacattcgctcattgcgggattgcaaatcagccagaagctccgccgcgtccttgctgaatgtgatcaggtcagggggaagaatatccgggtcatagccggagcgcacagcctttctctgttcctccactttcattttcccaatgtccgagattttccccttgatggtcttgattgccttgagctgatccacggtctgaatgtgcatggtcacggtcatttccgcatccagctccaagatttccgccagcagcttatccgaaagctccgatgccataatctgcaagtaggacaccgtgccccaatactggccgatacggaatgtgcgggactggcggaagtcgagactgtccggggcaataaagtcttttgtgccaagcccggtctgtgggatgtctttccacgaaaagcggaacgcctcacggctccccgggtgcatctggctatgaagcagcgcaaggcgggcccgtccgtccatcggctccgagggaacgcccagtcgcttaaagtttcccatgacatcggcctccacacgctccagacggggccgtgcctccgcaatcccctcggcgggtatgcaaaaggtgatgtattttgagcgttcaatgccgttattgcttttggcaatctgatttttcagcatcccggtaaactcatcccggacgctgttatagttgtcatccgctttcgggatattgacctgatagcggctgcgggaatgggaacgacggttgataaaggaaagctggaacggcagcgaactgtcaaagtagttgagaaatgaactccatccgctgaatatggcagtctgatcctcggtggatgccacggagtaattgatgtcctcatattccacggtttttgtatagagcccgcccgggagcttgcacacaccgtccgggtgcatggacagatacgggattgtctgctgagcagacagggtcgcccggcctttacccttggcgacggctccgtttttcttctttgtgtttttcaatcacatcctcctttccagcgcccggcccggcaaagggcgcataaatgttttcggttcggtaggccctgatccccggccttagaaacttggcccggatgatattccgcaccaccttttcaaagggtaagccgtccttttcatacatggccaacaggaacgccgggagcataattcccagcatgagaaacatcgccccggtattgccgagggtgccacgggtcagcagataggccggaatccccactgcgcccgcgctgccgaagcagacaagctggcgtttggtgaggttgaaagccatctttgttttgattttggataaatcgtttggtacgtttacatagggcatagatcacactcctttctgtacttcgggacaatgtgtcccaaagtccgggatggttggtgttacttcatttccccatacagcccagccgggcggggtctgcctggcaaagagctccacgcggggcagatcgcccatcagggaaatgattttggcgcgggcctcgtccggctttttgctatgggcttcaatcggggaaatgatgaattggtgaatgttggcagcctgccgctttggatgtcctttggttgccagcaggcagatttctgcattgccccttgtccagaagccaaggccgtaaaaccagctatccgccttcttgttctttttcagccagacgaaagcaacggatttataggtgaagccccaagcctcgatcagccggagcgcctccgggagctgcgggaaagtggcccataaaaagagtgcgctgtccggggctgcaagatcagccacaggcaacgcacataactcctcaatgctcatagtgggataatggttttccgccgcgccctgtactttcttagccgagtagcgccaagggggatcggcgtaaatgatagaatactgctggataattacactcctttctcgccagaactttttactgcctgcgccgcacgaatacgctcactggctgcggcataaaaggccggggccgtttcaaagcatacaaagcggcgttctgtgttgatggccgcaatcgcggttgtgccggagcccgcgcaaatgtccgcaaccagttctccggggcgggtataggtgcggatcaggtactcgcagagctccacgggcttctgcgtgggatggatgccgccggacaccgtaggcacaaaaagcacatttccgggatagcggcggccatcgttggactcggagccctgccgttcaaatttcccatagttggagcttgtaccgcttcgagaatgtacgcgggtatagggcttgccataagtaaactgaggattgtagaacggggacttctgataaaataccaagatattctcggactttttcagtggagcccggtttgcattgagaaagcccgttccgcgctccttgtaccaaatccactcatagcggagcatggcgaggttggatgcgcccagcaccttgtcaaaggggcactgtgcgaaaaacagcactgcgccattcggcttgaccgcccatttcaccgcctcccacagctccgggagcggcaggggcacatcccaataattccgggttgtgccgtagggcggatcagtcagcagcatatccacgctatgttttggcaaagaacgcaggccctcgatgccgtccatgagaaacaagccctccttcgggacactttgtcccaaagtgcggctatcggtcattgcgggcctcctttgccttggcaggcgcaggccgggcggtgttttcctttcccgcctgttttgcggcctcggccatctgctccttgatcggggcaggccgtaccgcctgggcccgtgcaacaagctgttccaccgccgcgtgatacgcttccacaccagccgcattgatccgttcctgtgtggcacggtcaggaatccgaaccgtagcccggtatcccgtccggctggcaggatcgggtttagagggagcaccgaggaaaatcccgtttttcccatccacaaccttaaaatcgtcgatgaccacaccgccaaagttgacgctggcgaagccgatcagtttaccctgcggctcaatcgggcggacagatactgtgatcggaacaaccgcctcttgcaagacggcatccgtccgcatttttactgcctcatcaatgctaacgcccttgacttccgcaagctccgcgatgggagcatcaaatagccagcgccgctcctccgcagcaatctgctcctgggtcagcaatacatcgtctttcttactcagataaaattcctcctttccgcttgccggagcaggctgggcggggtcgtccatcagctcttttctttgcaggacggcctccgtttccgccataaagcggtaagcgtccgcttcagtaaactcctccggcgtttttccattccataagcgcgttccatccgccccgtatcttctcggcataagcacctcctcctgttaatgagcgccaaagatacgctgggcaatgctcccggtcttaaagagcatgaagcaaagcaaaaccgtgtagcccacagttccccaaatcgccccgatgggatcgccgcttgttgcgatgccttgaatgagcaccgcgtaaattgcaacacatacaagaatcagcagcccttgaaagcccacggcaaacagggacttgatgtagttttgcccggtgctgccaagctcccggttggaaagcgtagcaacggggatgggggccagactggtcagtagatagatttccagcatcctgccatacaccaaaacgaaaatgataattcccatcgccttcattgtgaagccaatgagcgcagactgcagccaaagccccaaaagcggccccaagtccatcgcctccagcgaggtttccagttcggcaagcatatccgccgaaacatcggtagagccttgaatcagcccacctgcctgcgcgataacgctctgcgacacatcgaacacagccatgacgatattgaatgtatttgacaggatcaggattgcacaggccgttttgaacatccatttataaaggttcgcaacgtcaacctcgtgcatattgttcttttccaaaagcatctgtatgagctcataagtggcaacaaaggtcagcaccattccggcaatcggcaggatcaccgtttcggaaagctgtcggatcagggagaaaaccccggcgtgccacgccgccggggtagtccctacctgtgccgcaatctctccgacttgggtattgacagtatcaaaaagaccttcgaggttccccatgatgccgccaatcagaagctctttgagccagtttgtgagccagtcggtgagaaaatccataagcgcctaccttaaaacaggccagacaacagagggatcagtgtggtgccaatgacgatgatgccgccgcccgccatgagctgttttatccccaaataggagtaaaaccttgctcgatggcaggcggcggcgtgtcaaaaaatatatggaattgttttagaaccgccccggaggggacaggtcagcccttgacctgttccacctccgggatgggtttgagattgaagtgaatttcgatagaaatgtgtcgtgtcttatcgctgtcgatgtgttcatggacaacgatttctttaatcaggcggtttaaggtggcggcgtccaactccgtgatgtcggcatattcctgaatggcgtccacccattgtttggcgtccatcgccagccgcatttcatcagccagcttcttgcgtccctgtgcaacccgttctttcaactcggcctgttccttctgcgtcttgtccagcatgagattgaagttggcttcgctgatccgcccagcaaccatgtcctcatagagccgcagcaccatcttttccagcacctcaatccgttcctcgtcttttgtcagggaacgctccaacgcttcccgttggcctttctgttcggcttcgcaggtgtcggtcagcttcccggcaatggcttccccatcggtcagggcagccttggcgcaatcccggattttgttcaggacaaggtggtaaagggtgtcgtactccacccggtgctgggtgcaatggttcttgccaaacgccccataggtcttacaggcgtaaatctgctgcgggtgcttggcgtgggtggtgcggatggtcaacgacttgccgcactcgccgcacttgataagcccggcaaacaggctggtttccccgtcctgccgggggcgctggcgggatttcagcttgtcctgcacgatggcaaaacttttgctgtcaatcaacggttcgtgccgttcctccaccacaatccagtcctgcggcttcttctcgccaatggttccaattttgaagcggtagtccttcttttgggaagctatcgccccagtataaacgggattcatcaggatgtcttttatcacagagaagtcccacatataccgcccgttttccgggtctttcttttcccatttggtgcggacattgcggaagccccgttcccggttccaccatgtagggcaaggcaccttctgttcttccagcctgcgccggatgaagttggggccgtgtccttccagcgcccaaaggaagatttgccggacaatgggggcggtttcctcgtccaccagcaggtggtttttgtcctctgggtctttccgatacccaaagggagccacacagccggtaaactggccttgctgggctttcagaagatacgaggaatgtaccttcttggaaatatccttgctgtacatctcattcaggatgttcttgaacggcgcaatgtcgttgttgtcccgcatggtgtcgataccgtcattcatggcgatatagcggacgccgtgacgggggaagaagtcctcgatcagtgtgccggtctgcaagtaatttcggcccaacctcgataaatctttcgttatcacaagatttatctgcctgcgctcgatggcttttaacatccgtttcaggtcggggcgctccatgttcagccccgtgtagccatcgtcctgatagactgccacaacctcccatccctgcttttcgcagtagctttccagcatatcccgctggttggcaatactggcgctctccccgtcaaggtcatcgtctttggaaagcctgcaatagatggccacccggaagctgcccgccagaattgcgtccatgcctgtgtattcatatccgttcatcataaccgtttacccgcacaatccagacggaacacggttcttctgaacctcgtctttattatatcctaaatcttgtgttttcgcaagattttccttcccggtattctgcccatatttttgggcaatcaggctcacaaagacatccgctgcgtccagctcaccgtcaaaaactgtggtaacatgaatctctgttttcgtttttgccataggcagttatcctccataatagaatagccagacaaggagaaggtcggcaacgaagtccggcaacgggcttcaaaaaacctcaaaaccatctctgtctggcggtttggttacaatttatattttcttttatttttctgttgctttggttgctgataggggaaaaagcccgcaattacggggctttccccggcaaccagcccggcaacgggagtgcaacaaagtcggcaacgaggtgggattttcagaaaggaagctccatctgctctgtgacctccacaaatccctccggaattttttcggctccgttgctggtatccgttgccggggcttcacgctcccagcccttttgcctgccgtattccgggaacatccggggattggaaaagtagtgccagcctgtgacacaatggttcataatgtcgttgacctcccggatttcccattgcttcggctcgtcaaaggggtggttcagggcttcccggaaaagctgcttggaacacactatgctgccggtatagcggtcaaggtaggcttggatcatcccggccttggtgtcctccggcatgaaatcccgctggtgttctttgagatagcgcaccatttcggggctgaaagacagcttaaaatccccactgcggtaaatggtcatggcttccgcccatagctgctccatgtaggctctggaagcggcttcatcgtccagaatgtgaacttccgcctgttccgggtacaccatgaccggcagaaagcgccggttgccggaacggtcaaggggcaggaagtccagggcattggaagtgccgccgaacacgcattgccgcagcctgtcctccgggtgggtttcgtatgggattttatagacctccttctgtcggctcaaaaaagacttgatttcctcaatgctcttggcgtttgcggtggcgatcatctccgacatctcaataatccagtggccttgcagcttgcggtacacattgtcatcgtccagcttgcgaaggtcatcggaaaaccactcgtctttcacagccagcagccggaaaaaggtggattttccggctccctgaccgcccaccagacagagcatgacctcaaacttgcagccgggatgaaatgcccggtggatggctcccagcaggaacagccgcagggcttcataggtgtacgggtcgctgtcggctcctaaaaagtggtgcaggcaggtacggatacgctcggttccgtcccatgaaaggccgttcaggtagtcccggatggggtgatagccgttttcattggcaacgatcccgatggcagcggcaatcttcttttcgctggtcagcccataggtttcttccagatacaggagcagatagttcatatccgtgtccgtgatagcggtgccggtacggttgtagccgatgggcttaatgatgtcggtgcgctcggtcaagagatttttggcgattgccccggaaagcagcgggtcattctgaaagacggtcaggcagtttcggatactgttgcggacgccgcctttctcggtgctttccagcatggctttgacttcctcaacgctccggggcggcggtgattcttgcatggtctgttctgcggcctgccgtatctccggcggcaagctctgccattcgtctttcaagattgctcacttcctttccacagtcgatgataagggctgcccgttcctccatgtccggggagagcagcacatccagcagatagtccacatagtcctgcttttgcagggcttccacaaagagcgggtggaaatcctcgtctggcgtcttgggggcataatcccgtttccagcggcacagcaggtttcggtaatcacacagcacccggaagcagtaacgctccatacggcggaaccgctgttcaggggtttcctgccgggggttcctctggctcctgtggggcggctccctgttctcataggggacagaaaacgcctgtgccagtatgagggcggcttccttggggctgacagcttccagacgggaaacaaagtcgatcacatccccgtctgcctgacagccgaaacagtgaaagcgccggtcaaccttcatgcttgggtttttgtcggcatggaagggacagacgcacatcccgtttcgtcccacccggattccgaaatgctcggcagcctgccgggtggtaacagactgcttgacagcttcaaatacattcaactaaatcctcttgaaaataagaaaagcgtctgtcattctcgaaaagaaaatggcaagcgcctgttaaagttccatatcctgttttttctctgtgcggggctgctggcgtttctcgccctgttcctcccggatacgctgcgccctgcctttgactgcctgctggatggacggtttcttgcccggttcggctgtctggcggtactgctcggacggaagcacctgattgagccagtgacgcacatcccggagaatcttcacatcctcctgcaccgctgacaggcgttctctgtactcggccacctctccggcaagctgtgtccgttcctcgttcaatttcttggtgctgtacttggttccctccaaatgcaccttgaaatagcggacagcggcattgtatgcgtccagctcgccccgatgggcggcggcaaactgttcctttggcttcttaaaccggatggcggcatattctgtatgaactgccttgtgggcttcaaagttggcgatatgggaaagcatggtgtcgatctctttcatgcgcttttccttcggcttcatctctgcccggatagaaacggcctgcccgctgacggtatccagataggtgtccaaactctccacggtggacagctctttttcccgcagatagcggatagcgtccatgaccttgttgaagtcgttcacagtgcctttgagctggcctttgctcgtccagctggtgcgctcctcccggcgcaaatccagatatttgcccagcagctccggcagggtgggtttcttcgcttcctgcaaggcttccagcagggcgacttttttctccttcaggtctgcgatccagcctttcaggtgacgcaccatctgacggatggactgcataagccggttggcagcggtaatatcccggttgagattgccgatgttggtctgtatccctcgtttctccatctggctgaccgctggccccatgtggacggtggggattttatcaagcccctgccgttcataggaacgaaggtcaaggcgttccgggcggtcattggcttccagatagcgattggcgatagccgcccagccctgccgccatatctcggcgtacttctggtcgttccagtctacggtgtcctccttgtggcttttccagttcccggacgggagccggatacgctcgccgttcttgtcaaggtcataaaccttccggctcttgggaagccatttcccggtttcgtccattgcccgcatggtcagcaagatgtgggcgtggggattcccgtcccccttatcgtgaatggcaaaatcggcaatcatgcctttggaaacaaaaaactcccggcaatagtcccggatcaggtcggcgtgttgctccgaggggatttccctcggtatggcaagtacgatcctgcgggcaagctgggagttccattgtttttcttgtgtctcggcagcgttccacaagatgttgcggtctgcgtactccggcggtgcgtggggcggcagcatgatttccgtgtggacaattcctcgtttctcggaatagtatttctgcttctggtcgtactcagaaaacagccgttcgccgctctggtaagctgcggcggctacggctgactggcggttgctgcgctggacgatttttatatcgtggtggggacagggcataacggcttcctccttcctgtgggtgattggatgaggtggtggtttgccaccgcattttgggtaaaagaaaagcaggaaaccgttcaatgatttcctgctcggtggtgccggtgggccgctggtattcagttttgaaagttcgggtcaggatggctcgaagatgaaataaaatatctgtatgaagattattcaacttcttttagtaattcttcaacagaaacaccgtaaagttttgcaagtgcaaaaagatttgatgtggaagggtcagatgttccattttcccattttgaaacagcctgcctgctaacaccaatcgtttcagcaacaaattcctgcgtcattttgcactgtgttctgtgcgctttgagtgcttcacccagcgatttcctcactacagatttttcttgccgtacatcttttgaatggatatatttgagtaatgcacgaacaataagggtaagcaaaccaacaaagatacataagaaaattattccaactattatcataaatacgcttactttcatttgaccacctcctaatgttgctgtcggctttattcctctgtgcggatatatttaagtaatgcacgaataacaacggtaagcaagccgacaaagatacatgagaaaactattccgactacaatcataatgatgtttactaacatttggacgacctcctttctttgttggctttattctatctgaattaccgtgttgctaccaccaactatcaagcaattatcagttgcatatcggttgcacaaagatagcgttctgttttttaaccttattatactaaattaccgtagataaggatagcttgactgataaaatttgctggacgggaacagcttgtagcgcaaggtgtttctgggcggcaagtccacaaaggggtagctggcggcagccagcgcaggggaagtatagcttcccctgtgatgattggaacagattgaaaatctgcggaaatcatctgctccctgcaaggggcttccggcaggacgcaacgcaccggctcgaccggtgtatagttgcgcccttacttcgtaagaggttccccagctaccctctgtttcacactttctgcaacagcttctttcatgcctgtttgggaaaatgcctgtttcagaatgtccatcacatcatcgtccgtcagcacttccggccttatcaggaaactttccagcatagcccctctggtacagagccgatgcgtccgttccttccgggtaagctgcttcatctggtgttccagtatcttttcttcgtgctgtgcccgccgcagtctggcttcgcttttggcaagctgctggttgagctttttcagcttttcattcatcacagcagccctccttcttggggagcagcgtgtaaatgcggttcggttctcccacgccccggcgcacccgcaggattagtccagcgtcctccaattctttcaaggaacgcttgacggtcacggagctgcgggacaaggccgccgccagctccacaatggggaagcggacaaacaatatcccgttggtatcctccgtactcgccgcaaaggtggcgtccagcagtcgggcatacatgacctttgcggtgctgctgaccggcagccgcagtatggcggtgggaagtggcatacagggcggcagaacggtgtctgcggtcataaattcaaattccatttagtcggttttctcctttcgcttggctcgtttggacaggtaatgggggcagtcgatcacgacagcccgaaagctctgtttgcactcatgctgacacttccggcacaggtcattgcaggccacacgcccccggtcattgaggaagaaggacaactccaacttccgtttcttgctcattctcggcatggtgcctcctatcatggaaaatccgcccatttcagccgtaacggtagagatgggcggatagcggtttttggtgtcatgtttcggggcgattttcaaggaaaaggcggccatagagccgccctaaaaagccccatagtatcatggacagggcagactacgccccgtcgattcgtcatgtttgggtagcgttttggtgtcagttctgccgggtttccctgatgtcgttcctgcccctgaatctcacagcagcgttttgttcccgttggtacgctcgctgcggtcaaggttcctccaactccttgccgcaggtcgttgcgctacatcgccggggagcatatcccatcaggccggtcattcgattggaataatccatcgatgaactgacttaatcatagctcatttttgaaccctttcccgtatgtccagaaagtaggaataccgccccaaaatcgaaaatttccacgatttcggaacggtatggtataatggttatatatgctcgaaaaccacatgggaagggagtggcaaaccaatgaaagaccatgtttccttgcaggaacgcttaaaagatttacgggtggaaaagggcttgaagctggaagaactggcggaaaagaccggcatttcaaaatctgctttagccagctatgaaaatgaagaaaaccgaaataaggaaatcaatcacggcaaccttatcgcactggcagacttttatgaggtgtccattgactatctgttctgccggacagaaaaccgggagcagataaataccccgctgtccgaactgcatttgaccgatgaagctgtggcgcttctgaaaagcggacggatcaatacccggctgctgtgcgagatgatgtcccacgaaaaatttgcagagctgatggctgacgcagaaatctatgtggatggaatggttaccatgcggttccatgacatcaacagtgcgctggctgctgtccgggcaatgatactggaagaacatcccgaagctgccgcagaccgttccctgaaaattctggaagccggtcagatagaggaagaagattttttctgtcatgtgacacacaaaacatgggacgctatccttcacgatatacgcaaagtccatgagaacgacatggagagtgcgccggataccacacccgccgatgaactgataaaggaagtccgaaaggccatgcaatccaccggcgacagggtgcaggaatttctggaaatcttctgcaaggcgttccagctaaaatacaagcggctcacagacgaggaaagagtgaccctgaaaagactgttcaaaagatcgccactgattaaaaattccgggatcaacttccggcgcaggccgtggaaatgaaaactgccgttgtgggaacgggtgttcctgcaacggcagttttgaatcatatatgaatttggaagtctcgaaactcaaacaatccatttccctgtttgagttttccggctctcgataattgtgcaaatccggcttcaatgtcacctatcaaagaaacaggaatatccaactggtggtgtccgggcagaactttttttattttgtatttctgtatccgccttatggattgataaaatagttgcggatcagtagttgggtaaaatgcgtcaaggcttcctttgtatatcaaatccccggaatacaagtaatttctttctggctcgtaaaagcaacaatgtccgggagaatgtcccggcgtgtgaataacctgaatttcccgtccgcctaaattcagaaaatctccatcctgcaagattctttgtggcataccttgaaatatctgataggcgttaatatcaaaatctcttggaaaattacaaggaagtcttgttaaattgttctttacaacttgcaacggtatcggaaacctgactgataaccagtccttttccgcttcatatacagcgatattatcaaaatacttatgcccgccgatgtgatcccaatgaacatgagtagtaattgccataacaggcagctctgttagactgtccacaatttttctgatgttggaaacgcctaagcctgtatcaatgagaatagcgcatttttctccacataatagatagcaatgtgtttcttcccagtgtttgtattcgctaatagagaatgtatcacggtctatttgctcaatggtaaaccaattatccattctgcataattacctccaacaactaaatttcccggctaaaaccactttgcgttttcatctctgaaatgtggtatagtgccatctttataagggtcatatcgattttcattgcaaccaaattcttttaagagggcaatcttgtcatctggtgtccattcaatcagtgatattccatcaaacgcttctacattaccgtcgtccattttattcttaaaataccattcaacgatagtctgattgtctttatggaaaaactgtttgatgtcccattgtaagacggttccccgggtattccattcctcaaaccaaagtattatcttctttattccgtgatattccggcccccagctttcaatatagatggcattatttgaaaaaatatcggatatacctaaatctttctttgtaagccacatatcaaaccaaagtctgataattctttctctattgtccatttcgcagaaccttccttgttaatttgatatttcagcttcttcgtcatgctctaattcaatcacattcaaaattccacagttcaatgctttgcagatacgcagtagtgtttccatactgatatgctttcccttgcccatgttggcaatcatattggtggtcagaccggcggacagccgcaagtcctctttcctcatgccacgctctttcaaagtgtcccatagcggttgatagctgatgtgcataggctcccgcctctctttccatcgtcaaatgttctgtacccattatagcagaaatcttgcgtttccacaatatttcttgaccgcaccgccggttccgtctggattgtgcttttcctttcttcacttttattacatttaattagccataagctgcttcatgccctgggacttggagcccgggttatccgagccgtagccctccagcagattgaccacaccccatacgccaaggccagcgccgagcgcgataacgagggtctgtaaagtgtcgattgcagatgagaaaaatgccatataagcctccatttctccgggattttcccggtaacaaaaaagccgcccatgcaggcggcaggttacaaacttcgggacactttgtctcgaagcgtttatgcaaaggcgtctggatcgtcgatgtcatcatagttgaggatgtcctcgtcctcttccgtgagtgcatcgtccggcacagccacctcatacatcgtacacgcctcgttcagcccgggccgcctgcggcggttaatgagcctgtcgaggtcaaaagcgtttttctgtttatcggcctccgccgtataacggtagttcggatgccgtttcagatcatacttgggagagaagaacgggggcaggccccgaagctgcaaaatacatttgtctcccggcatggttgcaagctcggctggggtcatcagttcccggcccagccgctgggtgttttggctgtagctttccgactggccacgggagcggctgtcggtctgcatactgattgtggcttttcccagccagttctcggagatttccttgatagtgctggcttcgcggccaccgaggaacaccacgctgtccatgttgccgaggattgtctcggcgtgtttatcgtaaatggccttgcactgtgccaactgctgatacaacaggcacaaactcacctcacgggagcggatgaccgcgaccagcttttcgagctggggcacctgtcccgtgttggctgcttcgtcccacagcacccgtacatggtgcggcaggcggccaccgtgaacattgtccgcccgttcacacaggaggttgaacatctgcgaaaatgcaagtgccactaaaaagttgtaggtctgcgtggtatcggaaatgatgaagaataccgccgttttccgatctccgatgcggtcaagctccaattcgtcataggccatgacttcacgaagctgcgggatgtcaaagggagccagtcgcgcaccgcaggaaatcaaaatgctttttgccgtcttgccgctggccaatttgtactttttatactgtttgaccgcgaagcaatccggcttgcgcttttcaagcccggcaaacatatagtccaccgcgttcataaaatcctcgtcatcctccttgacctccatgccggaaatcatatccacaagggtattcatgttccgatcctcggcaggcccctcgaaaatgatgtaggcaatcagggcgcagtacaaaagcgtttccgattttgtccagaatggatcgccttccttgccttcgcccttggtgttggaaatcagggcatccacgaatttcagaatatcggcctcgttgcggatatacgccagcgggttatagtgcatggattttgaaaaatctatgctgttgaataccttgattttgtacccgcgtttttgcaggaaagctccgacctgtcccagcacaccgcctttgggatcgaccaccacataagaggaatgagcctgtaaaagctggggcgtgagccagaagcgggttttgccggagccggacgagccgataatgcagcaattcaggtttcgggcatttgcggggattttcgggcgggtgttcatcgtgagaaactccgtcccggtcaaaatcacgttgttttcaaaccttggatcaacaaacggtttgatgtctttttccgttccccaccgggcgctgccgtattctgcatcccgccgaaacttcttagcgtttttgcttttgaaatagatcagcagccggaaaccaactgcgcctacaataccgacaagccaatccagcggagcaagaccgggtgcaaagtcagcaaaggccgggccaatcgtctggcccagcccgatgagcttatgtgcaaaatcgttacccgccgccagccggtaggctgtccccagcttgaggcacgcccacaggatgaatagatagggaatgttcggaatgagatattttctgatcttatctgtcctcataggccacctcctttgcacgttctttctgcttcggcttttctttggaaagctgatctgccgcctgttgcagttgttcccggatgggaacacggttcgattttgctttgcttaacaccttccgggaatactcagaaaagcaggcggtcattgcgtctgcctgtccagccttgaaaaacagcaggtatttgtccggcccggttttatagaacgcatagtccacattccatttccgggctacgcggtcaaaggacttggcatccccggaaagctcaatgctgtttgtggctgtgccgtgggccatgagctttcgcacactttgtttgccatgcggtacttgccgcccacggtatgccttgcggatcttccggcctaccatgcccagcacatacgccagtccccgcgccgtcagcttggttgtttttacggatatggctatcgtgcgccgggaaatatcttcatcaatcagttacaccgcctccttccttgggacaatttgtctcgaagtgccatcaccgatccccacggtcttttttctgcatttgacggtagccctccaaagaagaaccgtctatgatttcctgataagcggccatttgctcccggatagagagcttcgggaaagagaataccttatgctccttgggaatatcctgcaaaccgtgatacacttccacgaaatgatcgctttctttgacaacatagccgcccggggcaaaatggccgttctcgtggatgcaggcatcccggccatacgcctcataatcgaaatacggttttacctgatccggtacatccaacatttccagatcgtccacataaatacgccccagcgtttcctcatcggatacgccggggtaaaagccgtaacagtccagattttgtgtcagattgatgatgtcccgcaccgaagaacagtgatcgccgctgtcgaggacggcctccaatgtttccagttccgatggggtaagttcggaaagcaggcaggccagatgattaagctcgtccagattttcatactcgctcaaatggtcatagagccccagcacatccccatcgaaagaggtaataaaaatttcctgatagcggacgccatccacgccgatccgtttcaagagagcctccacctcctgggcggttgtgggaaatttcagtgtttcacccacaagctggccctcgctgtacttccccgcgttggtaacgtaggcttcaaacagggtcgccatcagcggcggccctgtcccttaacggtcaggatgccctcaagggttgttgccgtaattcccagccgctgggccacggcaatatcatttttcatggcttcggtcatactgtgcccgcagacaaccagcacatgagaacggcggagcaggtcacggctcatgtcgatgccgcttttatgctcctcaggaacagcatcgttgagaaacaggggcaagtacaaaggcggacaaataggagaaaagcctgcctcatacacggtgcggcaatactgcgccgccagttctgcgttttcgctatcgccgccgagccatgcagcggtgatataagcaaggggtcgtttcatcgttcatacctccgatattttaataagaaagttcaacccaaaccccacgccctttcccagtcttgggaaagggggcggctctggaggatatacccccgccgcttgccggggaaatagcacagccggggcagaccgtcaagggcgagccgccgaaaacggcggtgcgctgcacccttgacggcccactcccggctgtactaaaaaacaggcggcgacgggggatatataccaccagagcctctgcgcgagggcggggccctcgggacaaagtgtctcgaagttgttacttgtcaagttcctgctttttcggggcttttgccagctccggcggctgtttttctttccagtcatccagcagggacataatctgttctttcattttggcgggagtgacctccttgccaaaatacttttccagttccgcagtagaaataatcacgcctcgctcctcctttttctgttctgataagataccgtcaatgacatcgccgttaagcttgccttccttatccagctcccggagccgtttagcctgggccagcgagggcgaagcctgctccccgtcaatggaaacagcaataagcctctgatttttcggtttgatgtaggaaagctccacggcaggcatgaagcccatctttttatcgtctaccttatccagaagctccggcacaagggagttgagccgcaagtagcgcatgacctttttatagttcatttcatgcgcctcgcctacaatctcaaccgagcgtttcccgacatcgccttccgcaacacctttcagccgcccgccctgatgcttgatgtcctcaacctcgagttccagcagcgcggccaattcgctggggagcatcccgtcacgctgtttgttgctgtccttcatggcctgtaccgcttcgtggtcggtcatttcacggacaataaagggcatttcctccagccccgccagttcactgccgtgtgtacggcgatggcccgctacaatttcatagccgtttccgtctttctccgggcgggcaagaccgggaaccattacaccgtttacgcggatagaagcaacgatttcctgcatcttcgcatcatcccgtaccttaaaggggtgcggacggaatgtgtgaaacggatgaacctcggaaagtttcagataaaccagcttgccttcctcaaccgggcggggcggtgtggtcggctcgggagccgtctgttccgcagtagcagtttccttcggtgccgtatcctgtgcgggcttaatgggctccttggcatccggggcctttccatcgcttcgggacactttgtctcgtttggacggcttgggcttgtcaggggccgccttatccgccttgggtgggcggcccttgcgggccccagccgatttctccgctttctgattttcagtcgcagccttttccgctttcggcggacggccacggcgcggctttttcggttcctccgtattggcgggctgcggtgtttctccggggggttccgccttttcgacttcggcgcgggcgttctgcctcttttccgccataagttcattgattttgtcaaaggacacaaccacatcgccggactcaggtatggcaggcccggtctgttcctgctggggctcagacgctgcggccttttcgggtgtggtgataggctcggcggcctccggggaaatattctccgcagggccagtattcaatttttcatcggccatttacgatcctccttttcgttaaagttgcacaaatttgaacgctaaaattttgtagttatttttgcgcctcctttccgtctatccacgcaaaaaagccgcccgtttttcatgccggacggctttttgcgtaatgtgatagatcaaatattattttttctggtttgtaggctccgaaaagccttgtatttacagtgttcctaataggaagtaatcatattgttaaacaaggcggaatttcagaaaaacaagatgctatttatctgtttgagaatgattcactgccttccgaaaattccatttatatctttttggcatatgcacaagaggatggttcgttactaatttctggtccaaattcaaatgtaatgtgtaacgattcgaatatgtattctattaattctgtctcagaggaaaaatcagttacagaatacgatgagtttattacatataaagatgctaatgataatgagattattccagttgatcgagagcgttataaatctatatatgagactgacaataattaatcattatttctgaaatatatagattaaagatggcaggtaggtgcttaacctatctgccatcttttcggttttatacctatatgtagaacagttcgtgcatgttgggctaccattcgtgcatagagggattgaaaaaattaaatactctgttatattaagcacataccatggtaaacaaataaagttgtctgtaattgtcagacaattaaggagggggggggtgaaaacgatggacaataagcaagtaaacaaggcaccccagaaaagtgcccgtctcgtacttcaggcagtgactgctattgctcgaagtaatgcaaattcattgtgccgtggtttgttgtatgaaccaaaagtcccaacgcagttaaaaaaataagattgggaggaattgactatgatgttaaaaagtttaaaacagaagattgcaaaagtaggtattggtttgttttgtgcaggatgtgtatttctttcttcagcagcatattctcaggcggcatcttacaccgcttatgcacttaaactgaataagactaataactttacctctatgcatgcaaaaacaacatccgatgattacatcacaaatgaggtaacagcaattaccaatacctcttacgcaaatttctgggctgtcaataacagcaagagtaaaatatctaataagtataagcagggtgttggaacaggatcttgtaatttaatctttaccaagagcggttataattctactaacacacaggtcggtatgggaatggaaaattatcaatctcaattatcaactgcatttgtaagtggaaatgtagattttagataacagaagggatgggcataaacctcttcgtgggtttatgcccttttggtaaagattatgaaaaaaatggttcttatagaaatcaaacattgtattgatcgtgcagaatataaagttgtttttattgctctaatgattttaaatattgcttcgtatattttatgtgtaaaaaatgatataggaaaaagttatcaatttattcgttcagcaaatgaaaatttcgtattacagggcactgaagcggcatatattccatatataatgtatctgttattgcctgtttatgcaacaattattgcatcactttccttaataagagaagaaaaaagcaatagttcaatcctacttattcaaagaatcgggaaaaagaaatatttagcaggaaaattatttggcattctgattgtaacctttttgacaataacaataccaatgctcataaatttattattatgccacttgacatatccaatacatggatatgacagtgcttggggagaacctgattacgctataggtttggtatcatataacgctgacaattttcttgatatggtgagattgcaacatccaactttatataatctaatatacatttttaattacggaatttttggctcgggattagctatcttagcttatgctctttcatattataacaaaatgaaagttctatatttcgcaaagatacctggtgctttgtttatattctatattgtttttaatttgattgtttctgtctttgggctaaatgaattctctatacaaggttatattatgcctaatgttcatggaaatataataggagaaattgttctgatattgcttatttttggattaagtattggcattatacagagaaaaataaaaaattatgaagttatataagaaaaaaattttgaatgttaatgttggaaaatgcttactagtatcacttataacatttgtaattagatatttttatgctaatgtgtacttggggtttcataatagtctggttacaataacagaaggagtacgttcacaaatatattttgggggaatactaatagatcattcgtttgaccttatatctttatcattttttgcgattttgtttatccttgagatttgttatcttacaatggacttatttaatgatgcaaatgataacatggtaattctacttcctcgttatgggaaaaaacacataatttataaggatatattaataaaaatgatattacgtgactgtattgtagttgtttccgattatttgttttttctttttgtagagcatacctctaatggcttagaagatttcaaagttatttttatgctattgatagagatttttcatttgcaaatgattagttatttgttttcattttggaaagattcaattataggatacatcgttgcatttattgtattttttattccagtaatggtgtgtggattttatttttcaatgggaaatgttatatggaaaatttggcattattccttgctacatattcctttatttaattggcataacaagcttattatatattatgtcgaagaaaattacgaatggactacaagcaatatagatttattgaattttaagtcaagctgtctcatttcagttatatcatccgctgttttggtgtggataggtaaatttctttgcgaaaaaaaacaaatattgtgaggtgaatgatatccatgaatttatatgtaaaatctatttcaaagtcaattaaaggtgaaaaagtgcttgatgatatcagttatacatttgaatctggtaaaatatatggaatatatggtaaaaatggttcaggtaaaacaatgctactcagagccattgcaggttttataaatacagacaaaggatacataaaatataatcacaaggcattacataaagatatggatgttttaccagatttaggagctgttattgaaaatatttctttttggagtatgtattcaggatttgaaaatttgaaaatgctttccaatataaaaggaattgtatcagatgaagaaatatatgaaataatgatatactttggtcttgatcccaaatcaaagaaaaaagtaaataaatattcattaggaatgcgtcaaaaactagctctttgtcaagcactgatggaacatccaaaaattttgcttttggatgagccaactaacgcattggatcagcatagcattgatttatttcgtgaacgtatattggaagaaaaaaagaatgataccattactatactgacaagccataataaagaagatattgaaatattagcggatgagaagatatgcatggaatttggtaaaattaaggagttgatgtaatgaagaaatttgtattaactatctgtgttgtaatcatttgtatggtgacagccttattctatggaaagactgggataaaaacaactacaggggttcatgatcctgatattgctttatcagaaaatacagctatggaaattttctatacaggagggcagaaaacttcttactttaacaatgaaagtaattactcattggatgatatggaaaaagattcttctttaatagctcgtataactgtaacaaattctcgtgaaatgagtttacgatcaacaaaaacaatggtaaaaatagaggaaatctataaggataattctgctaatctttcagtaggtgactgtatttacattatagaacctgtatcatttgttagaggtgaagaattttacactaacggatggcaatatctgaagaccgaagatacttatttaatatttttaaaaaatctaggatgtattgatgggtataaatacaccaaagaggaagaaaattcatttatgcctgtatcggaaatatattcaaagagaaatctaactcatgatgaaagttgtgtggtttttgattcggcggaaactctctattcaagtatatctatgtttgcatttttgacctcagaaaaaactatagtagataattatgagaaaatatggaaaaacattacaaattcaggtaagtatgaatgatttaattatttatgaatgaatctctcctattctatttcctgtgagaagcgtatcaatgttagaaattcatggagatactgaattaagcaatatggaatcattcaatcttaaagaaactaaaaatggagataatagaaattgaataaaaagaaattggcaaagagtgttgtaggcattgctttaattgtaagtgtagctatacttatcgttgtatgtgttggaaaaataaagcacattcagaataaaaaaaatattattggtacatggaagaatgcaaatgcagaggaagtgtttacctttcaagaaaatggaggacttgttgtaaacaaagatatgcccgaattgggtattacctgtggcaatgcattatatagcatatcttcctcaaatatgatttttgtggaacagagagataatagcgtgaattttgagatagaagtagatcaaaacgaattaacaatcttctttatgggtcataaatattgggaattaacaaaatagcaattgcatataaagcgatactcatgatatccataaccataaaatatagagccgatgaatcactcgttatttcgattgtgagttatcggctctatttcattatttatggaagggctaaagaaatatcgtattttatagaaatacttttgacagatttcttctcatttttatgttcttttatcaagtgctataccattccatattcatcgcattcacccaatcttgcatttctgaatcaagatacaaacgggcatattctagtggattgtcaatcgccagtgcatccaacattcgttgagagttaggagtagtaatcaatccatcttctgccttgccacagtcaatccgaagtatgtagccattgtaataattgatgtctatgatgttgtgatatttattatattctgcatgaacgatattcatattgcaaagtcctttctcttatctgtttcagttgtagaagcatcttgaccagttccagccgattatgtgatttatataatgttattagctgttaccggattttgcttcccttgtttttgcccttatgaggtgtcgtaacacaagggaaaaggatataacataagggaaagtctaagggaaagctcacttgccaaaactgtagtaaaatcaaggcattgcggattttatcgtaacactttataataccagttaggtgttaaagaattgtaggtatcaaaattctgattttcacaataatcatttatacatcccaatacatctatgcgatccatctggcaacgttcaagatcatcaaaaactaagattacaggtttcttatttatgatattttttactcgcataaaatttgacaatcctacagatgcaagaagtttcatctcatcgtttccttccatctttgcaattgaagattgaatattttttagaaatctcgttgttttcttaagaacagtaggaaaattctcataatacgcttccatccaactttctttcacaagcgaatgaatattctctaccgaggacactccaaataaagagacccgaataataactttttcttctcttccgttctgaccatcaaaagttgctttcaattcatgatcaatcaaatatgtcttcccacagccccattcgccagtaaacatcaatgcacctaccggctccggctctgtacagtaatacactaattcccgtaatgaactctttttgtcgatttgtaattcctccatacataaaccttccttttttgccatctgatattttctcattttctttttgtaattaaagcgtttgcattgcataattgccgctacagtaatcacaataattgcaaataaaaggatacaaaatgacttaggaactgagtaatatgaactacatgtcccataagaaataaaaagaattgtaataggaacaataaccgcatagacaatattgtatgcagattctaatatatttttctttttttctaaaaccgcttcttcataactccatcccgaccgagagactaactcctctttacatacataaattttaacttgcatgacaatagcaataactaagactactgcaatagctacaggaaaaaggtatgctaatccagtgatatttcctaatgacataaagaaaaatagtactggaaaatatccaccggaaagtacttcccaaaaacattcatgcatatcgcctttctttagtaactctttttctttcgcattgtgtacctttttcttttccctgtgatagtaatataatattataagtagagctgctccaactatcatccagatttcataagatttaaaaatttccatgtccacttcacacaatatttcactcaaaactgtgataattgccacctattcctttcctatattgttattgtcaaattctaaagtattgaatttgtgagctttaaattatcagctcacagaattctgctcggatcgttgttccccactgtgggcaacttcataagctcaatatcgcaacgacatctgagatttttcaacatctacatatagacctttacttctaaagaaatgtttcaatccaatagcggcaatgtcactaccattttttgcaccgaccaaaaccctttttaatgaattcacgtcttgtattttttcttttacatatggaattaaaactccattcttcaaccgaaaatacactggaactctatcttctggcttacaaataccgccatcatgaattctagatattacaaatctatactcattttccccttcaaaacatggaagcttaaaaaacatgttatatccggtaataaccatagccatcaaagaaacatatctaagctctattaaagtgcgtcttcttttcaaatctaccttcctcttttctcaatttcgcaccgttagtcattaacctaagcaggcacttgtcttaagttgacattaggttgaccacattggtatcaggcaccttatatagtttcttatcaattataaatatctgtccgtatctcttgcaccatacattaaacgtcgtacttccatcacatcatcaatcactacataataaacaacgtaattgcgtacataaatccgatagtaagggtagtcacgtttttttgcggatgggtatggttcaaaggcaacaggattgttcagcctttccagtatggcagcttctacatcatcaaccagacgaattgctgcgtcctcgttctttaaaacattcgtaatgtaattcgctgtgctaatcaaatcctgttcaaagagtggtaaataccgcagcttataggatttattttccatatatagctctccttacattgctgaatactgtttcatgtgaaagacgttcctctgtcatagctgcctgtctgtcagcttcatcaagtttcatttctatgctgtctgtcagacttgcatattcttccagacttaaaacaaccatagcaccataaccattctttgtcagatacactggttttcctccgtttacaatagcttcaatttctggaaatttatttctaaggtctgaaacaggtcgaatttgtatcatgttcaatcgctcctttcatatcatttattctatcctaattttatcagaatattatcacagaagcaatatttacttattttttcggaacgtttttctatgtcacagtatattatatttatgatatgataatagagaaatattttagaaaatcagaaagatgaattctaaatcaaaagatacattcacagtaggtgaaataattgaatcagatgatgtttggattattaattccattgattggaacggtactgggttccggtatggtattttttttgaaaaaggatttgggtgtattgacacagaaagcgttgcttggatttgcttccggtgtaatgattgcggcgggagtctggtcactgattatgccgtcgattgagatggccgaggaacaggggacaattccatggcttccggctgcggttggatttttgcttggaattgctttcttacttgcattagatacgttgattccgcatttacatgtaaatgatgagaaaccagagggaccggcatcgaacttaaagaagagcaccatgctggtgcttgcggttacgcttcacaatattccggaaggaatggcggtcggcgttgtattcgccggtgcgatgatggaaaattctaccgtatcgatggcaggagcgattgcacttgcaattggaattgccattcaaaatttcccggaaggcgcaatcatttcgatgccattaaaatcacagggaatgtcaaaatcaaaagcctttttgtatggcgggatgtctggtgttgtggaaccgatttcggctgtgattacgattctgttagccgatttagtggtgcctgttctgccgtacttgttatcgtttgcggcgggggcaatgatttatgtggttgtggaagaattgattccggaatcccaggctggcgaacattccaatattggaacaattggtgttgcaatcggatttgtaattatgatgattttagatgtggcactaggataaagacgtataagaaaggaaaaaatcgcgaatgaaacttacaatattaggtaagtgcctcaaaacatgacgcactagtattacagcagtttttctgctatactagccgcatcatcaatggaggcactttttacgtctctttttcaaatagcattgttctggaaggtcttcagaccatggcaataaccgatcgatcacagtcgggtcttcctgatgatgattgtttggcatttctaaaagtagatattttaaatattcatatacatccagctcattcgctctggcagtttcaaccagagtatataaaactccgtttgcgaacgcacctcgtggtgtgtcagcgaacagccgggctcttcttgctgttgcgaatggttttatatttgcttcacaataattattactcagcgggatacgtccgtcttcgagaaatgtttcaagatattttctctgattttgacagtatccaagtgccttggtgagtttctcgtttgaggtatacatggcagaggtctcttcaacccatgaccaaaaagcctctaggatcggctcggaagcatcctgacgctttcttttcttctcttcagcaggaaggtcattgatctctttttcgactttaaacaaaaggtcgatatattctcttccttctgctcctttggatcccgggatttcttttcctttcgcatctaacgggatgctttctatcaggtatcttcgagcatgtgaccaacataatgctctttttatatccggcactttgtcataaccagcgtaagcatctgtgatcagataaccgttaaatccctccagcaacattttggcgttatcaccactacgggtacgtgaataatagaagaatgcagcttgaatcgcttcactcgctgcgcttcgcattacccacatgaaggaatcactgcttggacgttttccttcttctttgttgcactggattctagtctcatccatgtgaatcagcccacattccagaagcttttcatgaatccgccagtaaacaggttccagccagtcctgactgcatcggatcacccagtttgccatattgctccgggacaataccaaacctaatcggtaccagtctctttcctgtctggaaagtggaagtcccatcgcaaacttctgatacattacctgggcaaccagggatggcgttgcaatggaatgagccagtggtgatactggaacagaagctttccgaaaattgctcttctcatttgggcttcccggtttaccacactccatacactttgcgatttgctgaactacatgtttcacaacaatcttagcaggtctgtattcaacttctgtgcgtactagcttcttgctgatcaccttcatcttaccaccacagatcccgcatgtttcatctgttggaatcacatattcttcgatttcttctggaagcccggccagcatttcctgacggattcccggctgacgaggtttccgctcatgtggcttcacggcgatttttgtttttgaaagattcagctgctctgcaagttcttgagtagattcaaacaacgacaactgcccatctacctgtttagaaacttcagtagatgggccaaataacttttttctagcatgaagcagagcctggatcatgttatcaatctggatattctgttttctaatctttgcatcctgcttttctatgatcttattcttgttttccagttcttgcgcctgttttgctgcaagagctctcaacatcagtaattcttcgtgttctgtcatgccattttccttttcattttcaataagaatattataccatttttcacggtatttctctactgttttgcaggaattacagcactaaaaaatgccgattttataagctttttacgctctttttatagcgttatcacgaagattaaaagcaacaattttttacgtttatattcacctgatgatgagcctttttctgttcgatttccaatccctgcagaagccattcgacttgttggaaagtaatctcttttacttcatcagctgttttcggccattgaaatttcatatcgtccaacagctttttcgttgccagcacaaaaccattgcaatcataacgtaagacttttatggcatccctctttctgttacaaaagataaagacataatcatcattatacggatccaacttaaaattaagagtaaccattgcaactaatccgggaatctgttttcggaaatctgtactgccgcaggcaagaaaaatgcggcttgcgccttctgcaatgcgtttcatcataactttttcaatgtgcgtaaaagctgtaaaagtgcatctgactgaaattcatctgggatgtaaagtttcattccttgatagtaaatcatcagacgattatcattcgatgtagtccgatttttagtattgttcgctgcacaataagtgtgtgcagtatttgatgaacgtacaacttctccaaacgctgtgacagtttcttgatttgtttttgccatgagtatagccctcccttgatttctgttttttacagtatatcaagatctggatggtcggtcactacgtcatgttttgaggcacttacgaaagaaatttacatgtgttggcgatgaaccatataacgaagcggattatgaatttgtgaaaggcagcgattggctgatgcacgaggcgttctgcctatttggcgaggcggataagtttaatccgtatgagaaacatcacagcacagtaaaggaagcgtgccagcttgcggagcagcttcagattccaaatcttgtactttatcataccgaggagacacatttgaaggagcgaaaagaattataaatttaatggtgcctgtcaccaatggtaggtagtttctattaagttaagggactacctatttttttgtacttattttaaaatatacttgacaaaacctcaaaaaaatgcggcgcttcgcgccctttgattaataagaaaaatccggtcgtgccggaaaattaaattaatcggaggcgtgttatgaatctttcacctgaatcagtaaagaaaacattactaaacaaagtaaacgaattatctgcatcttcctggcagtacacaaaaaaaactacggattttacaagaaatcgtaagatttcattcagcgatgtcttgctctctacaatctccatgcaaaaatctgcatctaaaacagaattgttaaagtatttcgattttaacgcttctgcaccaacagcgtctgctttgattcaacagcgtaaaaaaatatctccagaggcctttgattctcttttttactcattttccaatgcatttttcctcgataagactttgaaaggctatgatccaattgctgttgatggctcagatatttatatcccaagaaatcctaaggaccccgatacctatcgggttaccgatcggtacaataaaggatttaatatgattcatctgaatgctgcttacaatttattatcacatttgtatactgatgtaattctccaaccattgaatcatatcaatgaatatatagcaatgtgtgacataatagatcattatacggctactaatcctacgcgaaaacctttatttattgctgataggggattggtatcattcaatgtgtttgcacatgccattgaaaacaatgcatattttctagttcgtgctagagaatcgaacccgcgtagtatgttggctacaattaaacttccagattcacctgagtatgatatcattttcgaaagatggcttaccagaaaaaatacaaagactgttaaagcagagcctgaagtgtataaaactattgcaaacagaacttttgattacctcgaccctaaaagtaaaagtttatactacatctcttttcggattgtgagttttgtccttccaaatgggaacaccgaagtcgtatataccaatcttccaaaagaagattttagcacagaggaattacgggaattgtacaatatgcgttggggaatcgaaacatcttttcgtgacataaagtatgccgcaggacttcttttcttccatagtagaaaaaaggatttagtaatccaagaaatctatgcaaaactcattctttataacttttatgaactgattactggcgcaattgttgttgaaaaaaaggatcggaagtatagttatcggataaatttcagcatagctatcgctatatgtacggaatttctgagacgctcttgtgcctcaccgcccattgatgttattgctttaataggtagggaattaattgctgtaagacccgacaggcgcaatccccgctacttaagagcaaggactgcaactacattccaataccgataaaatattcatatcttgatattttttcagtaggcagattccccaatctgtctgtttgccatgcctgaattatttatctagagacgcaatacgagaactgtatcaagaaattcataatttcccggctcttctagtatatcatgattcttatcttaatgatagctacctaccattggtgcctgtcaccttttacttttttcgggaagatcttggaagccttgatttccctgacatttcaaaacaggctctgtcaaaggctcgccaatttattaaccctgacttatttaaagagctctactatttatcagttgatttattctataagcagttcccatctcgtaaactttggaatggatatcatttatttgccattgatggttctaaaatagaattgcctaattcgaaatcgaatttcgagttctttggtgaaatgtttggatatcctgatccaagccgccgttttactatgggacttggttccattgtttatgatgttcttgatgattatattgtccatgcttcttttcaacgatatcttgcatctgaacgttccgctgctttagagcatttgcataatttagaagatttaaatatctatcaaaacagtgttgtaatctttgatcgtggctattattctgaagatatgtttcgttactgtgtcgagcatcagcacccttgtcttatgcgcttaaaacagaattataacattgctaagaaatgctctggagacataatcacggttcttcccggcaacgaaaaagatgggactgaggatatcaggataagagtcatcgaagttattctctgtgatggaacgaaagagtatcttgccaccaatctttttgattcacatatttctcaacagatgttccgcgaactttgcttctatcgctggccagtcgaaacaaaatataaggaattgaaaagccgccttgatattgaagaattttccggtgcaacgaccacttcagtgcttcaagaattttatatcaacgtacttctttcaaacctgtcatctcttattaaaaatcaagttgatgaagaaattcagattaccgctaaaagtacgaataaatatcgataccaagcaaaccgagcatttattatcggacgtgtcaaaacaatagttcccaaaatcctgtctaatcttttcgatttatctgtacttgatatactatataaggaatctctcagatgcagatctcagattatgcctggaagaacattccgacgaaagaagaataaagcaataggcagaacacattttaacaataaaaaagttgcattctaatatcaatagctgttaatagggctttttctgtgaagctctattaaagtgcgtcttcttttcaaatctaccttcctcttttctcaatttcgcaccgttagtcattaacctgagcaggcacttgtcttaagttgacattaggttgaccacattggtgcctgacccctggtatatgacccaatatgacccaatgtaatccacataatcctgacgtacctgcatttcagaaacaattatgttttccggtttaaatgcagaatcatactgtaaaagcatatctatagcaagaccagaaaataacgcaaaaaaggcagggcggcagggcgcgaattacaaggaacggatttgaaggcgtaccggggtacgacgaaaatctgtgacgcagtaattcacgttctgcagtgctgaattttttgcattattttctggaattgctataaatagtattgctcaacagatattctatgtacagatcctatttgcaaaccttctgcaagtcctttgatatgcaagctgaactgttcgtttggcgtcaaaatcaaagcattctgcgaaaaatcaaaataccgctgcttatattttagtgccgaaagtctatgcagtaaaaccattgtttttccccattgtgtcaagtaattaccaaaaaaaatgtcatttaatatcgaaaataagcattagctgataaagtaaccatgcccatttttttggtgatttttattccgaatctaatctccacttgattttggccaaatacaaagatactggatcaaaaaatccgataatttcatctaatattccttctattacaggtatcttatatttgttttttttctgccacatataggtaatcagagaagacagcactaaagaaataagtgcaataattatactccatattaacgaagaggttattagccctccaattaccgtacttgcacaagtcagaactactgaaacaattgctgattttataatacgtatagcttttactgtgcttcgctttttctcaaaataatcatttgaatctgatcgtgtagaatacttttcgaattcattaatgaatttattaaagcacttttggtttctcaaataaataacatctgaaatgtctaatttttgtaaatcactctcttgttctattactttaagacgaataagaaattgaataatctcatctggattatactttttgtttatgatttcatcaaaagtgcttatcgcaatttctatttcagatcgtatacacttatgttcaaaatatgtgtcataacaaactttaattctctctgtagaagctccagccacaaaatataataaatcggatgctttttttattcttgcatacgtactctttgtaatatgctcttgtttctttaaatcttttaaaaatggatcaaaatcctctttcgttattgttgttgacctcataaattatcaaaatactgatttacttgcctgtctctgaattgacctgtatactgtcatcagcatacaaaaaggaaaaggtctcagagcaccctcctagcaagttgtgtactctgagaccctggtcactaaaccatggttattatatcagattattcacttgtcctcaaggaggattttggtgttttttgttgagagcagtgtgaccacccatatgtgccccatctgtcaggctacgcttcgttaccgggattcacgcccacgcatccgtagaaaggaaggcggtttaaaagatcagttgatcattcggcggttttattgtaagaactgccactcttatcataatgaacttccggattgtcttgttccgtacaagcattacgaaacagaagtgatctccggggtgctggatggcgttgtacagccggaagacttagattctgaagactacccgtcctgcgctaccatgctccgctggctgcaatggttctgcgaaaatcttgaacgtatcaacggatatttaaggacgatcagggagttcctgctgggttataacgaagagaggatttcccttggttcactgctcgattctttcagaaaccaatatcaaaactggttagaaatcatcttgcgtcagatttacaacagcgggggatttttagtcccgatctgctggtaaggcttatgcacctactttgcatcgtctgtcgcggtaccaacgggtatagtggtctcaaaaggaggtcactattttatgaatacaagaataaacaaacaacaatggcaggaagaagaagccctcaggcgtttccaattgatttctccgcttctccaggctgatctggatgatgcaaaacggatccagctgcgcaaaaagattgcagaggagaatcatatatcggtccgttccctttaccgttatgaaaaagcgttttcggaaaggcagtttacagggctaaagccggctgaccgggagaaacaccgctcacaaaaactccctgaaaactttgagtttctgttggagcaggcaatccagctacgcaaggaggttcccgagcggtcggttgcccagatcatctacatcctggaaacggaagggcttgcagcacccggtgctttaaagcgttctactttggaacgccatatctacaaggccggttacggccaaaagcagatgcagatgtaccaggatgcaaggaacagttcttccaaacgtttctgcaaaccacaccgcatgatgctgatccaggcggatatcaagtatggtcccaagcttccgattggaagaaatggagccaaggtacagacttacctgtcctcggcaatcgatgaccactccagataccttttatcttcccggttctatgataatcaggaagaagcaatcattgaagatacgttccatcaggcggtttcccggtatggaaccttcgatgcctgttactttgataatgggacacagtatatcgcaaaacagatccggtcttcccttgcaaggttgggcatccgtgtgatgtatgcaaaaccaagatccggtaaaagcaaagggaagatcgagaagttccatcaggtagtagatgcttttatccgggaatcaaagctgaaaaacatcaaaacactggaggaactgaaccgcctatgggccatctatctggatgagtattaccacaagaaaaagcatgatggcatcgcagaatactatgaaagccttggcgctgccgttccggaagaagggatctcaccgcttcaggaatggaaccgggacagccgcccactgacttttttggatacagccgttgtagccgaagctttcctgcatcatgagcagaggaaagtggataaaggtgcctgtatcagtttccgcgggcaaaggtatgaaaccaagccggccttgatcgggtatacggtagaaatctcctatgatccggcaaatcctgagatcatcaccatttctcatcccggatttgaaccttttcaggcaatgcctgtaaagattggggcgtattgcgatagacacgctacgctcccagctgctatgcaggaacaaaaaccgacaacttcccgttttctggatgctttggaaacgaagcatacccagagcaggcgccaaatggcagatgcgatttcatttgcttcctacaggaaggaggtgaatggctaatgtatgaatcattctttggcatggaacataccccctttgtccgggacgtccctcccgaaaaactgtttgaatccaatgctttccgggaaactctcggtcgtctggcttatgtggcggaccgccagatgtttgctgttgtaacagctgattcagggtgtggaaagtcaacgcttatccgccggttttattcggaacttccaaaagaggattacatcatcctttatctgtcagactcaaaactgaccccaaggtggttctataaaggtttgctggatcagttggggctggaatcccgtttctaccgcggtgattcaaagcgtcagctgcaacaggagatcgaggtaatccggggcgtacagcgtaaaaaagttgtctgcatcctggatgaagcccacctgttagagaaggagacgctggaagaattccgctttttgctcaattaccggtttgattccatgagtcccatggcgcttgttttagttgggcagacagaactgtgggaaaataaactaaagctacagcggtatgccgccatccggcagcgcattgacatgtactgtacgctgcctcatcttgaccgttctgaaacagaacaatatatcgcaagccacatggattactccggatgcgggcaggaaatatttacaaccaaggcattggatgagatccataaggcatctgcaggaatcccacggatgatcaaccgtgtctgtgaaaaagctttgatgtatgcgtttcaaaatcagaaacgattgatcgatgattatatgatcaagttcgttgtggaacacgagatgcttgggatggtaacttcataaagcaggtaccgcctggaaacaggcggtattgcctaactgactggtgacagaaagttaagcaagtgagcgtcaactgatgtgagcaatctggtgacagctcatgaaatcactaacacgttataatatcagttatattccaaaaagaatcaatatttcccattccttttacattcttatggttcttcttatattcttgtaaaaagattttcatagtttgaaaataatattcttgttgttctagtggttcatacgtctcacatgtatctttgtttgaatataaatcatttacaattttctgtatacgcaattcaacaatttcttgtggacgattcgtaatactggttttaatagaattataataatccattaaacagttttggttcttaggaattcttgaataaattatatttttttgaaatagtgtcttacagtttagcaaaatatcaaatttgtcattctctatttctaacagatgacgagaagggataagaatcttatcacaaaataaagataacaacaaaatatataatttatgattatattttttgttttgagttgacttttcaatcttaaaatacggataatatatatggcacataattaacttccttttcaattagtatccatattatacctttttttacattttttctcaacactctacataaacctttacgttaatagtatcttcagaattattttataacaataatacccatctaaaacatatctgctatagaactgtttgttaggataccatcgggcagtacaattgcagccttacctgtcccaggcttcaagaactgccaaatacgttcgatgaacagaacttcggagctttggtttttgcgtggctttttcttgcccttggcatcaacattgttgccaagctcatatgttgataaataaggcttttccgcaaggttgatggtagaaccgaacggaggattggtaagaatcaaatcaaaacgattctcggcaaaacctctattatgatcgtgtattttatcaatgctttcaagggcatcatgactgataacattggtatgaccatcatcgtggacgatcatattcatctttgcgacacgggcaatttcatcattgatttcaataccgaaaaggtgttttgcggcaaaatcgtgccaatagttgaaatagtcaaccgtgcctttttcgtaataatcgcctgcttgattacgcatatagtcaagagcgtgcaggaggaaaccgccagagccacaagaagggtcaagaacatcccaatcttgctctggcttcatcatctttacgcagaattctataatagggcgaggagtaaaatactgcccaaaatcgcccttaaagaaaccatccataaactgctcaaaggcaacgcccttaacatcaaggtcggttttattaagattgatagattccaaatgcgaaacgacagtgcgaagtacacggtcatctaccttgatagattctgtgaatacttcggggtccttaactttttgctcattataaagtgcattgatacgttctgccagtttagatgacggttcatgggtcttgatctgaaattgataaggctcaccatttttacgaggcttctgttcatcgctaattttaacaaaaatgagtttgcagagttcaccaaaagcagtagggggagagagacgaccaccgccccacaaggtctgatggcatttttttattgccgcaattaaatcttctcttgaggcaggtttaatatcgttatcagttcctttgtaaaatctaaattcttgaggttttccgtatgcccgtggaaggtcagcaatgatgttttgctcacgttcaaatgccccgtatttatcggaaacatctaatacccgacgagtaccgccagcgatgataattacatactctgcacgaagtttcacctatgtagcattaccgacaccctgctcaatagcctgattaaactcggcatcagtaacaccttcttttttgcattcaacgattgcataaggacgtttgcagtcatcgtcactgaaaataacaatatcggcacggtcagtaggcaatctgtccggaacaatgacttcaaccttgatgcggtttgcaggatattcatatttatatatcagctcagcaaaaaattcggcacgaactttttcttcgggatcttcatagttttccacatgcttttccgaggttatatactcaattttctttttgccgtcaacacctgtaatgttaatatatccatctttttgggctctttgtaacagctaaaacagcactggttcaaatgctgttttagccatatcgttgatttcaaacattttcattctccttgtctgggattttaaactctgatagaaagtaaaattactcgccaaagataaacctaacgattctatcacttgctttgtccgtggcgctcataatatcatctttcttccaataaggcttattagcactctgatatttggaaaccaaggcacgagctataggatatttgctgtcgatatatcctgtcttgttctcaagttttgttgaaaccttagttctaaaccattcgtttccgattgctcgattaatcttttcttcaagaagaatcttgttgcctaatttgtttacgacgccgtagaattcttcttcactgttaatctcggcatcttttctaatttcctgaaggttgttaccgctatatggcataatgtgttcaatgtcatattttgttccaagtgtaaaactcagacctttttcttttgcaaaaagaaactcgttcagatataccagcacattgccatcatagtcatgtaaagctgcccaaatagtttctttgtcccaattagaacggatatgttcattaaaatcctgtttaatttcatcgacagtggtgcttttactaacgagcttgacttctgctccaaacaaaaggtcttaaaatatttactggaataaccaacatcgacaagttcgagaagagaaaacagccgaagcaaacactcaagaatcggttcaacaagttcttccgtaatattatcctcatcgaatctattgttaacagtgcctgaccctttctatcatgagattactcacaaagaccttcgctttcaattactttcactacgctgtttacatacttctcacagatctcatcagaagctgcttctaccataacacggatcaccggctctgttccactctcacgaataaggatacgtccgtctgttccaagttcttctgctgctttctcgactgctgcctgaactgctgcgttatccagtgctgtctttttatcctttacacgaacattcttcagaagctgtgggaagatcttcacttcatctgcaagtgttccaagtgtgtgcttcttctcaatgatcgcttccataaccataagagatgtcaggataccgtcacctgtacgtgcatgcttgctgaagatgatgtgtccggactgctctccaccaagaacatatccattcttaagcatattctcataaacgtacttgtcaccaactgctgtctgctcatacttcataccaatcttatcgcatgctttataaagtcccaggttagacataattgttgtaacaactgtattgtctttcagttttccctgctccatgagatatttaccacatacataaataatacggtctccatctacaacatttccattctcatcaactgcgatacatctgtcagcatctccgtcataagcaaatccgatatccagatgtttctcttttacatactcctgcagaacttcgatatgtgtagaaccacagtttgtattaatattcacaccatttggctcattgttgattacataagtctttgctccaagtgcatcgaatacactctttgcaatgcttgacgcactaccattcgcacagtcaagtccaactctcatatccttgaaggaacgtgttgcaagagaaatcagatgaccgatataacggtttcttcctgctgcatagtcaactgtgcggccaatgctctcttttgttgccagcgggatctcatcaatctccccatcgatataagcctcgatctttgcctcaacctcagcctccatcttatgaccttcgctgttgattaccttgataccattatcatagtatggattgtggctcgctgaaatcataagtccgcagtcgaaatcctctgttcttactatatatgaaacacttggtgtggttgtcacatgaagaagataagcgtcagctcctgatgctgtcaatcctgcagcaagtgcatactcaaacatataactgcttcttcttgtgtcttttccgattacaattctggccttgtggtcctgtccgaaataccatccaagataacgtcctactttaaatgcatgctctactgtaagaactacattcgcctcaccacggaaaccatctgttccaaaatattttcccataatactataactcctttggtacttttaatgtcaattttatgtcaacaattctcttactctactgttacactcttcgcaaggtttctcggcttatctacatcaagtccctttgcaacacttacataatatccgagcagctgcagcggaattactgcaagatttcccataaagtgctcatccaccttcggaacatagactgtaaagtctaccttatcttccatctcataattgccatagtttgtcacacccatcaggtatgcgccacgactcttgcattccatcatattgctgactgtcttctcatacagcttgctctgtgtcagaactccgatcacaaggatgttgtcctcgatcagactgattgttccatgcttcaactcacctgctgcataagcctcggaatgaatataagaaatctctttcagtttcagacttccttccagacacactgcataatccactccacggcctacaaagaaaacatcatgtgcattcgcatatttggctgcaaaccactggattctctccttgtcctgaagaatcttttctatcttctccggaattgtctgaagttcagaaatgtagtagctgtactgctcgtctgtgatcagctctttcaccttcgcgaactgaaccgcaatacaatcaagagctgcaagctgtgcactgtatccctttgttgtcgcaaccgaaatctccggtcctgccagtgtatagaacaccttgtctgcctcacgggcaatactgctgccaattacatttacaactgcaagtgttgcaagtcccttctctttcgccatacgcattgctgccaatgtatccgctgtctctccggactggctgatcacaataaccagaccattcttcacaagcggcatctcacgataacggaactcagatgcaagctctactcgaaccggaatctgagccatctcttcgattacatactgcgcctctactccgacatgccatgcagatccgcacgcaacaatgtaaatctggctgtacttcttgatctcttcctctgtaatatcaatatccgtaaagtcaatcactccgtctttcgcaacagaattcagtgtgtcacggattgctttcggctgctcatagatctctttcatcatgaaatgctcgaaaccggccttctctgctgcctctgcatcccatttgatctctgttgtctctttctcgatctcgtcaccattgagatcatagaaatgagcctctcccggaacaagcttcgcaaactcaaggtttccgatatagtatacatttcttgtgtatttcaggattgccggtacatcagatgccacataagtctcaccatctgtaataccgatgatcatcggactgtcttttctggcaacccagatctctcccggatagtccttgaacatcacctcaagtgcataagaaccacgtacacgaaccattgtcttcgcaatcgcatcgatcggtcctaagttatatttcttataatagtagtcaaccagtttgatcactacttctgtatctgtatcactgtagaatgtataaccatgctttaacagcttctctttcagctctgtatagttttcgataataccgttatgtactccgacaacctcagactcaacttccccagaaccagagcgagtacagttacctgaaacgtgaggatgtgcatttgtctggctcggctccccatgtgttgcccagcgagtgtgtccaataccacaagttcccttcagcgcattgccgttatctgttttttccatcagattagacaaacggccttttgctttcacaacctgtgccaaattctctccatcacggacaaccagtccagctgagtcatatcctctatattccagtttagacagtccatccagcaggatcggtgctgcctgtcgatttccagtaaaaccaacgattccacacataggtttatccctcccgttatttatttttctctcctattatactttcctttttataaaaaacaactctggggagttgccagagttgtcattgactttatgctttatatcccttttcacaaataacgttgactacttcatccacatatttctggcaggtatcatggtcaggtgcttccgctatgacacgcaccaccaactcggtaccggcttcaccacgaaagccatctgttccaaaatattttcccattttttatcttcccctatcacagttcatttactaaaacatctgcaattcgctcgcaagcatgaccatctccatatggattgcttgctttgctcatcacatcatattcgcttttgtcagaaagtaaacggctgaactcgttataaatcgtttcttcttctgtccctactagttttaaagtacctgctgcaataccttctggacgctcggttgtatcacgcatgaccagaacaggcttaccaagagaaggggcttcctcctgaattccgccagaatctgtcaggatcagataactacggctcaggaaattatgaaaatccaaaacatctaaaggctcaatgatatggatgcggtcatcattccccaaatatgcatttgcaatttcgcgtacgaccggattcatatgaataggataaattgccttgacatccggatgctcatccatcacacgccgaattgctttaaacatatgacgcatcggctcgccaagattttcgcggcgatgtgctgttatcataataagacgactgtcttttgcccattccaattcaggatgagcataattttcgctcactgtagtctttaaggcatcaattgctgtatttccagttacataaatgctttccgatttctttccctctttcagtagattctgttttgaaagttctgtcggagcaaagttaaacttactgataatcgaaacagcctgacgattgaactcctccggatagggactgtaaatattatatgtacgcaatccggcttctacatgaccaaccggaatctgaagataaaaacaagcgagagcagtcacaaacgttgtagaagtatcgccatgaacaagcaccacatccggtctttccttttctagtacttctttaatgcggtttaagatatttgtcgtcacatcaaacaacgtctgcttattcttcatgattgacaaatcataatctggtgtaacagaaaacgcttccaataccatatccaacatttgacgatgctgccccgtcacacaaactactgtctgtaattcttttcgctttttcagttcatttacaagcggacacattttaattgcttccggtcttgtgccaaagaccaacattacttttttcattttaattttctccttgttttgcttttttaacgccaaaatacagcaatattgccaagctcacttcaccgattggtgctgcagcggaaacgccataaataccaaaaatcaagcctaatagaatattcagtccgacagttatcagtgagccaatcgtaaacgcatgactatacaacttttgattgccgctggcaaccaaaaactgtattcccataaagttattgattacactaaacagcatccaaagaacgagcggaattatgatcgaggaatattcaagatactccttaccaaatgcaatcaaaatcagctgttttcgaagcaatatgattgcaaaaccagctagtgcgaaagcaggaatcacaagttttgcagctgtgattactgttttacatccattttcaaatgagtttgaaaaacggacactaatgtgaggataaagggcttggctaattgggctaaaaaacagcaccatgatatatgggattttgtaaatagccgagtagattccaacggcactaacagttgcaaccgctcctaggacagtcgttccgatgccgctgaatatcttagacatcgcctgcgaaataaacagataccagccatctttgatttcgataatggcatctgtaatcctgcacaaccttacttttagaccatacttttttcgagccaacaggattccaagaatggcagaaagtaggaaggttatggcatagcaaatacaatacagatacaagtggttttcgctgtgtatcagcgcaaaaaccatcagcactgagaacaagcgcgatgccgcattgataatagcaatcaatttcatgtcctgtttgccttgaaaaagccatgtgagttggaatgcaacgcctagaataatcaaaaaaaggatattcatacagatatactgtgccctgcttacacgcaatactgcactcagtatattcatcgtcaaaaatgttccgaacaagagaaaaattcgcgccgttataattctattgtatagttcttgcagaccttcatcgccatgaatagaaactttacgagcccctgtaaatccgaagccgtattctacgattacctgaaagtatgtaacccagttaagcgcaagagaaaaaacgccataatttgaagctccaagaacacgcgtaatatacggcagggtcagaaggggaacgatggtattgaacacctgcaagataatcagccatgcactattagccagaacctttgatttgagcaaatctgctatttttttattcatctaatatctccaaaaatttggctgcggattttcttgtttcttccatccggcaatcaatttctttataatccaaagtactgcatattttcagagggtcttcgatattctgatatgcagcagttgcaccaacactttccagcaatcctttttttcgagtatcatgctgattttgccttgtgtccaaactagaaaactgcttatggaacaccaaagaaaagagagtgccatgaaaggaatcagtacagacgtatgaggcgtttgcaatcaaattcacaaactcttccggcccagcatcaaaaattgttcctttacggaaactattcaggccaaatcttgcattaattactttcagctctaagccacgctcttttgcaattttttgtgcaatcgcaaattctttgcgaaacatttttttatgaagaaagtagcaaattagatacggtttcccggacggatgctccaacatattgttccaagcatttgcccgcaacagcataacaggatcgcatacaacagacaaccgttccgctgttttcgcatcaaattttccaatatctttctgttctctaattgagatttttacaaagtcatccaaatagtgttgaatcttctgtatatcatctagtgaagcattgcccgtactggccgcatatgcgattttcttagctgttgtttgaaacggaaacaaaaatgccatctcaaaatcatcaatattagggttcaacacctgatcgcttccagaaataattacgttgtatttgttttctgctatatatttctgcaacgattctactgtagagaaatgctgtgtcagttgaagattgttttgacagaaagttacaaatctagcatatttttttcggatgctgtgtgcaaacggaagaagacaaatatttgcaactgcggttttgacagagcatccatgctttacaacatcattgttctttcgctgcttttcactgacaaaatcaaaaactgtgacttcatatcctttctgagacaaatatgtttgcaacgcatagcactgaagtactgcgccatagttcttcgcaaaatggtatgtaataattcctacttttttcattttcattttccttttaaaagtcgcttgatataatatttccaacaacagaggactgtaactctttttggcgatattccgtggcacagcaacttataactccaatctctacacttaggtcgtttgactggatgatgatacggaatattgtctttcaaagctgttttggaatcaatttttccaagcgaaaatacccttgtttcatctagaaagcatttagcttttgaggtattgcagagcaaaaccgagcatccatgctttatgtccactcccttaatatctgttttccatagatcacccgctgtaaaatcggtagttcgtgcttcatttgcatactggcacctgtaacaagattccctcaaaaaaatctgtcgctgaaaagataacgaaagcggatcttcttctccaatcaaatacacaactttgccgttattgaattgatagcggttcagataattccgaccaacatagcggtcttttgagcggaaaatatggttttgaaccaatgaaccatgttttgcagccgtttcagtgtagaatttttcgataacagttttgctcggaacgccttgacacagaatctcaaaagtaagcagatttttacgatttatgcccttgagattctgaatcgccgccaccatgcagggcgtgccagaaaccagtgtaagacctttctgtgtgcttgcaatgatttcacaatatgtttcctctgaaatagagcactgataatacttagagccagttaattcattcagttcttccagagtagctgtttttttatagaatagttttgtgcctaaatcttttactccaaaaactattccgttttgttctaacacagtttgcgcaataccgtaaaacgcgccgccggaggcacagtgttgtaatgcaactttatctttcaactgcactgcatagcaaccaatagtctctccaaccgcaggcttatttaatgatgggcatactttattacaaaggtcgcaatgcacacacagcgagctgtctacttctgggtagaaaaagccttcgagtgatacctccattttaattgcccgcttcgggcaactataagtgcatattccacagcctgtacaatattcttttttacaattcagcatatagttatcctttcttgttaccaatgtataacaatgcgtaccattcgtcccttaaaaaatttaaccataatattaatagcgataaggacaacaactaaaataaggtatacatccatgctctgtgttaaaagaaccatcgctaaaataagtccgatagatttagtatctacgtctcttgacctatcaatcattttacaaatccaaatcaacaagataattccagctgcaaatccccaaaagccaaaattgcaaatcgtcatttctaacagagaaggtgttgttcctgcgggcagattgtgaatatccaagttcaatatagaagcagttaaatacatataatgaggatatggtttgttcggccacacttttcgtggaataaaagaacctatcaggcttaaaaatgtctcaccacgatactctaaaatgcgttcaccgcgaataatttctttgttgattacatacttgataacatcatcacgtccaaagtcaactcgtagcatatcgtagatactcaatgatgatgtctcctccattggtctaattactgccaaataaaatacagagaagccaatcaatacaattcctaatattggtaatattctatatattttctttcggccgttgacatctatgtccatgtttactgtatagaatataaataagagtaaaatattggcaagcataaagcgttttcctgatatccaaacaattgacaccgaatataaaaacgttaggatgatttttttcatggttaaattgttttttaatactgtaccaaaataaacaatcatgctaattaacatacatggtgtcataagagccattttgtttgattctgttaatcctcttgcactcgaaacggcataagttacataatacttccatgagcccgttaacgcgatataaatgatgggaaggaaaatcaaaacagttgaaataactctgttattacacacaattgaagtcaacgagttatattgtgttaatactattccccgattttttcgtgcgcagaatatataaagaaggataatacacagcataatatataagtcatatattatgccaacctgtacattaaccatgggttcaataaatggcttataccaataaatagttttatactgtggtaatccaagcgtatagttgcaaatgatagggagaacgcaaaacacataaagtacaacaatcacataattcgctacggaacaattttcctgaaatacgacacgtttgtatgcagatataacaattcccgttgcagttaaaattaatagccagtcaaaaaagaaatccatgttattttacaatctttctcatcagtttttccattgtcttcagattatctgttccggcaaaaaatttttttgcgttttcagagtaggtatcataatctgcttcaatgttctgaattgcgttaataatgttgtttgctttcagttccatacactcagctgctccagcattaccaactgtattttttagacccggaatatcattggccagcatcggaataccaaatccagaatattcatagattttattcggcgcacagaatactttattcagtgcatcattacgataaaagacaatgccaatgtgtgcataactggtgatttccaaatggtaaggtgccggaatataactgacatactctacatcactgtaaaccgctttgattttttctacactatgatatttgtcaattcccatcagtaataaggtatacccggaatccatcgtccgcaatgccttggcaacttccaaaatctcatctgtattctgcaaaataccctgatataggacaacttttttgtctttgattcgttcaacaaccgccttcgtttcgggaattgatggttcatggcggcgatcagtaatctgattatatggtttgtttgggaacacatacggtacctctggaagattccaccacgcccgcatgatgtagccgcgtgtttcctcgcagacagtcaccgtagttgcgttttgtgcaagatctttcagcagcttaactttccgtgggcagtcgtctaacagttcaagcagagagagcacatatttttttctattcaaagcacctttcatgggaagagcactttctgccgttccaaaccaaagtattgtatcctccggatagtttttaagagttttcaacactccacagcgaaatttataccaatcctgtagtttttcaattttagaatttgccacatctttgatttcagcaactttatggcaggggatattttcttttgagagcaactttaatgcgctttcatttgatgttccatacagcacttctacatcatagctaaggtccttcagcatacgaatctgtgaaatgcacggaggataataatgcagctgtgtctttacgatatataaaactttcataatacgttactcctgttcgttaatcgagcttttataaagctcttccagttttcgtgcttcggtttcaatgttgtaaccagctttagtcaacgcctcaatattatcatcactgcgtggctgtgaagcgtacttcaagatttctcttgcccactcatccgctgatttttggatggaaagaaaatgtacattggatgttatggcacagcgatgatctacattttccgaaatcaaacaaggcaaatttgccgcctgcgcttcaatcgagactaccggaagcccttcataaaaagacggcagaataaaaacgtccatcacctgataaaactcattcgtgttcgttacattaccggtgagcacaatcgaatcttccagctgcaattcttttatttttgcaagaattccatctcgtagttcgccgtctcctaccagtagaaactttgctttcggtgcaattttccttatagcatcaaaaatctctaaaacgaaaaaatggtttttgggtggggaaaatcggccaatatggccgatgcacaccccatcgccgaatccgtattttttgcgtatcatctggcggatttcatcgttcttttgaaagcattgcaaatcaattgcattgcgcatcatataaactttatgggtgtctaccgcgtctttcccatacaaaaatacgcctgcattatatccgcaggccacccagatattagcagcggcacgattcattctcttcaatattggaaaggtcagttttgcttttaagttgttctctcggaatgcactgtgcgcatgagaaatgcgaaccctgacaccaagcatttttgcgagaaacagaacataaaaatttgtcagcgtcatgtggctgtgaacaatgtcaaagcgttcctgctttagtacttgataaacttctcttatatttttagcaatgctctttcgtttgtgtgttacaacatgaacggtataaccagcgtcttcaaattgacggatacagttatcatcattgatgtcctgcgtgatgatatgaaatttaaactgctccggatgttgaaaatgggtagtatagttcaatagcatagcttcgactccaccgaactcaaggcgagtaacaaattctgcgacttttatagacattaatttttttcctttacattatcttcataaattttttcgtattgttctgccatctttttagtattgtacaagcaagtaatatcatgatatgctgactctgtaattacattggtgccattgttttttacatttctgatggcatgtacatactcgtctgtaccactacaaacgaatccattttctccagtatgaatgacatctcgattgccaatcacattacttactacacatacttttttcatatacatagattccagtaacgatatcggaagaccttcccacctgctaggaaggagaaaaacatctgcattaactgcatatctaattgcagtgttccgatcagcccatcctgtgatttcaatattcttgcttgtaagttgctctcgaagttcgccatcaccaatccagataaatttcacatccggaagtgcttcggctatctcattgaaaagtgtggggtttttctgatagcagattcttcccaaagtgtaaaccgtaaatgggtgttctgcttcttctgttttatccataattttctgaagttccgccatgttgatgccattatttacataagtggcatgtttggtaagtttcagagattcttgatgttcacccacgctgcaactgatggtcgtgcaatttcgctttgcacacaacgattcaatcaccttaaacattctacgcttcatcggcttataattttccatcaaaaaactataaccgtgcggggtatagaacattgggatttttccattgaacgcaacccgaccaattgcaccagctttactactatgtagatggattacatcaggcttgatttttgccgctatttttttaacttcaaaaaatgcggcgatatctttcaccggatcaattgcccgtccaaaatttttgacttcaatcaaatgaatccttttatcgaaatagtctttatagttctgtggtgtctgtttccgcaccgcgtaagcaatgtacatatcataggaattaaccagctcatttgccaaatcaactatgtaagtaaaaacgcctccgcccatagcttcgactatgtacagtattttctttttttccgccataggtttcttcctccactggtctctcaatttttttatctatgtacacatccgctcttcacagatagtatttctttttcctcttaccgcacactcggctaagtgttttcttatgctgtcgtatccaattaccccagcaatcatattttccttgttttctactccataaaacatccgttgagtacactcgtctctatttctctatagtcgaagtgttgatttatacagtcgaaccccgtataccctgcaatgacgttttttctaagtgttggatttttgaatcgaaccctgtcggtgcatgaattttgttaaaactgtatatatcacccagtccattttcgtcattcattgtttgttataaacaaatcattcactccaaccactcacccgaatctccccatcctctttcttcacatcaaacacaagcggatgctccttcccccactccggatcctccttctccttctcattccattccttccatttctgaatgaaaccattgtggatcagattctctgctgcaagtcttgcttgcaccgcttcgtcataattgtcaaaaagaccaacataatagcgttttcccttgaacccaatatccacacgataccgattacaattcttcaactggaaaacgccacgaaaaccactcatgttatcttttctgctttttcttttttctagtacttcaacacaggttccgtctacgagatgtcgtctctgcgcaatttcctgacggttcttcttttgtaaacaaccgcagctatgataattaccatgcacaagacctgctgccgtcacgtcaacttcatttccgcaatcgcagacacaatgccaataaacggagccccgtttatcccttttttctgtcgcatatttggctgtcaacataccaaactttcttcctgacagatctgccggtcttcttcccataagccttcaccctttttgcaaaaaatttcgtagagtagattactctacgaaatttttatggaaagccttggaaatcaatggttttcaggtgtctgaccaaaaaaatgacggtaaataaatgctgtgaaatttgtaattatgattaatttttaaatacatgtgattgtaaaagcacgaaataacttagataatttaaaataaatatttttgattttctgatctgatagcttgtaaattgactgacaattgaccataaatttgacggcgaatagataaaaatccattcaaaaaaggagattaaaatgacgaaagtgtctgtttttcgactttttttgctaagagattgtataaattcatgaaatgaacgtatatgcattgacagaaatgtttgaaaagagtagactaaacatgataattatactaagatttgaaacaatttaaagaaaaagcgtatttcgtagagtaatctactccacgaaatacgctttctttttctattctgaacttttctctttttccccatacacctcaaagaaactgccccggattataaatacaattatttccacacggctgaccatcaaatattttcttattcaattgagcgatatatctccctgtctctttttcttctctttgattcccctccagaatccccagcgcagccttcagattccgaatatcccggatcatatcttccacataatttcctcgtcctaccagtttcagatgagtaatccctgccgcctccagctgtggcagcacacacagagcacatccactcttcccacagagatattgttgctcttctatctccaatgttctttttatcactcgttccatacgctcttccatctcagcatctccccagtaggtcgtcctgcacagataacccatctcatcacagtgaagggaattgcagaatgctcctgtgaactgacacaattcgttcaatgcaaaggcctcgaattccagtctttctgcatttacagcttctatcatctgccgcatcgatgcaactgtatttttcctgtggaagatgaaccggccgattcccatttcccggaaaactttgattgcctcctggttcatttctccggcttcaccgctgagatggatcttacaggatatgcctttctgtctcaggtacaaaatcaatgccggatcggcaagaatgaagctgtcgaatccgattttcatacactgtttcacaatgtctgcaatctcttcatattgttccggaatataatagagagaattcatcgcgatatgcaccggctttctgtacttcctgatcattgctgagaggatctctaattcactgaaagaaccgagctgcacattataagccagcacttccctgcggttcagtggaagtacggttccgtatttttttgtccagttgtatggcacatatccgcaaaacaattcgtctgctcctgcctggacatatggaatatattcatccacagagccaagtcctgcaacgattttcatccttcgctctgctttttctttttcattctgttttcttttctgtgtctccattcttccatcatccttctgtttttcacatttcacaatagattgaccacaagacggttccattttattccgagttctctcttcaactgctccggttcatccagcagatgtttatccaatgcgaacagactgttgtattttcccttcatatataaatgctttggatagaagaagctatgttccagacacggtgccggacattcttgtctctccctttgttttccacgttcaccgtgttccagtacagcgcaaagtgtacaatagctcgacgtatttgtctgatagaacggcacgtgtagatggttctgtatcttttgcggtatttcctgtgtatagccgcagctttcccactcataactgctgattccaaagctttcttccagataagtacgataaaatcctgcattcagattattctgttccaacagcgtcttatctcccatcttgtaggacattcttggatctttcttccgcttatttaagagcgtcccaagacacgggatcagatgttctttccgcttcacaagatgtgccagtccccaatcattgactacaacctcaagtcgtttcttctccgccccggaagtctcctgttgttcacaccactgatccaggcgtgtcaacagctgttctgtctgtgcaagcctgtcttcccgaataaaggaaaaggcaatggtcacttccatccgttctttatctgctttctcaagaagtgcaaagaactgttcttctttcggaaatagatgtggacagaattggttgccgatatacaaccggtccggttgtcttcccaggatccgcgcatctttgattccatgctgctgccagtattctttcatgaaccgttcaatcggtctggtcagatattgttcgtatagtttcggatgatccagttctaccgctaattctgccggcagattttggaagatctctgcattctgaaaccactctttattttgttctgtttcattcttgaaatgttcctcttcttcctgcgcgggataaccggtcatttcttgcgccagatgtgcatcatcctcttccagcttgagcgaaatgtatcggctgtattcgacacagagcttctgaaaggcttctttataatcttcctgaactgtgaaaatatcataggcttgatagaattctgtctgttcccctgactctatctgaaaatgacgaatttcaatctcccgatactctgcctgatccatctgatagaagcagatcttgaatgctttcggataaatgttctcctctgctttccctctcctgcaaagccggatgcggaatccttcggatgaaatctctgtcaggcggacttctctttgcctctcttctattgaatcttctgtcataactccggccagaagtccatatggaatcatctgaattcctttgatccttcgctttttcatttgcttcctctctcttttaaaaaatccttgcttgaacaaagaatgtgcctcggcacattcttgcgcctgcggcggtcgcttgcgacacttacattatacgccgcagtgtgcatcctaagcggagcgttttttatatattaggaaagcactttcctaatatataaaagatcgtgctgtcagcagaactctctgccgacagcacgattcctatactttttacttatatgattcgattagatgttcagaagatcactgaatactttcagggctccgtctgtctcatgtgcaagtacgcgttttgcaaggactttaccgagctgaacaccttcctgatcgaagctgtttacattccacaggaatccctggaacatgatcttgttctcgaagtgagcaagcagtgctccgagagatgctggtgttaactgctctccgataatgatgcttgaaggacgtcctccttcgaagttcttgttgcggttctcatcttctttaccacatgcaaatgctacgatctgagcagctacgttcgcgcagagtttctgctggcttgtgctgtcctggatcacaacatctgtaccgatctggctgttcttgaatcctacgaactgaagcggcacaatatctgttccctggtgaagaagctgatagaaggagtgctgtccgtttgttccaggctctccgaagataaccggtcctgttacataatcaaccggctcaccaaaacggtttacggattttccgttagactccatatccagctgctgcagatgtgcagggaaacggctcagtgcctgagaatacggaagtactgctgtgcttgggtatccgagtacatttctctcatatacaccgatcaatgcatcgagcatctccgggttctctttgatattcttattgagggacagtttatcctcagctgctgctccgtcaaggaactgtgcaaatacttccggtccgaatgcgagggaaagtactgctccgccaactgctgatgtagatgagaaacgtcctccgatatagtcatccatgaagaaggctgcaaggtaatcatcactcttggcaagtggtgaagtctcacttgttactgcgatcatatgcttagatgcgtcaagtcctgcattcttaagagcatcctttacaaaggactcatttgtcagagtctcaagtgttgttcctgacttggatacaagtacgaagatagagtgagcaacatctacagaattcagaactgctgccgcatcatccgggtcaacgttgctgatgaactttgcttccatcttgaatgtatcattcttctttgcccagttctcaagtgcaaggtacattgcgcgaggaccgaggtcacttccgccgataccgatctgaacaactgttgtaaacttctctccggcaccgtttgtgatctcaccagcatgtactttgttcgcgaactcagcaatcttcttctgctgctctacatagaaagtacgcttgtctacaccgtcagcctcaacagcatctccgagctgtccgcgtgtcatatgatgaagtacgagacgcttctctcctgtgttcacaacttctccgttgtaaagtgcttcgaacttctctgtcagctgtgcttcttctgccagtttctcaagagctgcgagaactgtgtcatccactttctttgctgcataattgtatgctaatccttctgccatcggaacgctgtagttcttcacacgctctgctccgttctctccggccatcactgctgcgaggtctacactttctgtcttcttaagttcctgataagaagtaagcttatccaaattgttccaggtaatcatcgttgattcctccttcaaaaaataatcaagttcattatacaatcaatcccgtgcaaattcaacccacaaacgatattatcagagcagctccgcaaacagacgtaagatcagctgtccgagtcttaagcccgcacttcttccttctttatactgctcggtcacttctctgctttctcccatcgtgcggatcagatcatcccggatctccagcactgcgtcgcaatctgccaggaagcatccattctcaaagtgatggtacagactgcggtaatcgagattgattgttccgcaggtcgccattttatcatctgccacactcatcttcgcatgacagaatcccggtgtccactcatagatacggactccatgcttaaccagattatgatagaaggaacgggtcacactgtagaccatcttcttgtccgggatacccggtgttatgatacgcacatcaacgccacgctttgctgccagtgtgagtgcatgtgtcatctcgtctgtaatgatcagatacggagtgataaaccagcagtatttctccgctttgttcgccatactgatatatacttcctcgcctacctgctcaccatcaagcggactgtctgcatatggctggacataaccacgctgttgtgcctggtatgcatagtggatcacatatttctccggtacaagttcttttgactttacatttccggctgcattccacatttccagaaatgctactgtcatagacttgaccgcatctccttccatacggatcccggtatctttccagattccatacggatgtgtgatgttgaaatactcattcgccagattgtatccacctgtgtaagcaacctttccatcaatcacagtaatcttccggtgatcgcgattgttcaggaacatattcagtcccggcagaatcgggttaaatacacggcatttgattcctaaagatttcagttttgttgcaaaatccatgttcacaaaccaaatcgatcccatatcatcatagaagatacggacttctacgcctgctttcacacggtcttcaagtaccgtctggatccgttgccatgcctcttcgtcttcgatggcatgatactccataaagatgaacttttctgcctttgaaagatcctccagctgtgcatccagccctttgatcgcctcatcataatatgtaacatctgtgttctgataaaccgggtaacaagaataattcgtcagataagaagcgattgcccccgcctgcggactctcttttttcatccattcgagaatctgtctgttatccggaagatatgggagcagttttttatcaatctcttcatatcttgcccgcatcttcttcgtacttccgttcagacctacgagaagatacagactcacaccaagaatcgggaatgcaagcatcagtatgatccatggcattttcattgatgaagtcttatccatgctgtaaagtccaagcacaagaaagattgccacgattcttgttgcccagtcaataatagttgcgtattcacttacctttgtgaacagaaatagaaggaagacgatctccagcaagatagatactgctgtgaagatcagcctctttgttccgttctctgtctttttctttccctctaatgtactgctgctcaaatctacatgccccttttctcttttccttttaataattgctattttctctttgcatagaaagacggagaatccgatcactcagattctcctgactcttttaattaacacatactataacagatatggaaggaaattgaaacaagtattttctttttccactgtttttttattcatgtctaagtgcctcgattggattcatgttcgccgctttcacggacgggatcagtccgaagataataccgatcagtgtggagaacagcactgcgatcacaatcgaaactccgctgatcgctaccggaaccgctgagactccggatataatgtacgcaagtgcgattcctccaagaacacctataattcctccaagcagtgtcagcaccgccgcctctgtcaggaactgtgtcagaattctgcgttttctcgctccgagtgccttctttaatccaatctcgccggtacgttctgtaaccgacacgagcatgatattcataactccgattccaccaactaacagggaaatgctggcgatccagatcaactgctgatttgtcgagttactgatctcctggatctgtgttgcctgttctaacagatcttctcctttgtatttcacggtatcatctgaaactgtcagcatagcatttaaaatatctgcggctttctctcctgccgttgtcatatcatctgtgctttttgcacgcacgacaaggttctgtggttcgtcatactggtagatgaccggccatacattatccggaataatgatctttccactctggtcatctgacatgtagcgatagtaatcttccattgagttgattaccggctgggactctgctttctttgcaaccattccaacgacaacaaaaggttctcctttaatttcgatcgttcttccgagcacatctgcattgtcgaataaacttgccgctgttgtcttgtctatcaaggctacttttcgtccttcggaataatctttgtctgttaatcctcttcctttggtcacctgatatccgtaaacatccagataatttctgtcaattccgagaatcacgctgttacttaatgactttgcgccacggtaaactgcatcgtattcatttcttgtatgatataaagacgctgtctccacttccgggagttcaacgacttcctgcaatgtctcgtctgagatctccggtactccgtccgggagtgactgatactgcagatcgatcggccagtcaccctgatagagctgtacatttaccgcgtcatttcctgcaccgaccagattcttcttaatctgttcattcgttcctttgatcgtggacacaattgctataatggaaccgattcctatgatgattccgagcattgtgagcgcagatcttaatttatgattccagattccctgaaacgccagtctgatgtcttctaacataatggcacctcactctctttcattttgatactgttcagtcttcttaataatagtcgtacagggtatctgcttcctgtgtctttgcgccttctttgacatctctgccgtaagggaatgcaatcaggtcgtccattgtgaggccggaggtgatctccagtgaattgtacatatttttgccaacctctacatactgttttgttaatctgccgttatcgccccgcttgtagacataatagcggtttccttcctcgcggacaaacattttttcaagatagattgatccatcactacctgctgcaattccatccatcgacagattcacagactcaccattcgagagatttgcgtctccgtggatcacgagcgtgaacggatagaaggactgattctggttctctcctgtggaataatcgcttaccggtgagttgccaacacctgtaactgtcgcttcgtaggattctcccgactgccaggacattacagtcgcagtcattccttctttgatctgatcaagcattgtctctccgactcttccggtcacatagaaaccttcttctccgacaacgctgacaaccggtttgttctcattctttgcagacgcttcgtcagtcgcttctttgactacaccttctaccgtacttttaatcacgccgtccccgacctttttcttcagctttttcagttccagttcagcggatctcttggaaagatccagatctttgatcttctgctctttctccttgatttgcttcgccacttcttcctttgacgggaggtccggggtgtctgggataaccggatcttctgaaatatccggttccggagttggctctggttccggagttggctctggttccggagttggttctggttccggagttggctctggatttggagtcggctccgggtctggagttggttgtgaatccggtatgactacctgtcctgtttttccatcgaggatccaacaggataagaattttgtcggcgcttctgcgttatctactacatcaaaggcacacacttgaccctcttttaatactttaagcataaacggtgcatttacggctgcccccggtgcacaaagataacgatacggtttttccattgttccgtctgcgtcttctttattataaggaacagaatctaatgtaatctcactgtaaacctcttttccctttaatgcttcagggaatggacgctcaattgcggaagacggtacatcgtcttttttattatcatctttggatgtgtcatccttcgcattatcatctttcgaagcatcgtcttttgaagtatcatcttttgaggtatcatcttttgtgttgtcgtcttttgtcgtatcatccttcgaggtatcgccatccggttttttattctcatcctcttttgatgtattaagaatggttgtctttacagcactcatcttctgtacagttggctgctgttctccagctgtgcttgtctgcacgacggatacccctgtatctgccttcgcggtcttcgtccccttgagctgggtgatctctttctgcaggttctgaatgttcaggtcaatcccctgaatctgcatttctttcatctcaagttccagggaagaaagtgtcgtgtcatatgccacaagacggtctccaactttcaccgtatccccggctttcacgtaaacctgtgtgatcggcatagtatcatccacgtaaatgtcctgcttctggttcgttgtgacggttccgtaacttgcaatcccactatcatcgtaccagccgccggaattcaaactgctgacaggagctactttaacagcctttccgctgttcttcactgcgaaaccgattccaagtgcaagaacgatacagcctgctgccacaggaatgccgatctttattattttctttttattcatccacactctcctccgttcccggaactccttcctgcattgcattttcttctacaggttcttcgtaaccgccctcggctcctgacatatctgaagtactgcctgatgtacctgaatcgttcttcacaacagccgcaccttttttgcactcctcgcttggccatacaatgtaatcagaagctttcagtccgtctacgatctcacaggttcccatatcttcgttcgtctctccaagtgtaacagaacgcttctccagcttgtcattatctcctgctacccatacatatggatgatctgaatctgcgtctacaatgtagtcacgcatcagccacatcttgtctgcttccagtgaagtacttgtctcgatatagacatgctgtccgagcatcaatccatctattgtatccaatgtgacatagaatggatactttgttgcctgattatcgctgttctcagaaccataactcatagaatcctgggaactgttctccggcttctctgtgtctacgttatctactgtacctgtccagatctcatcttcattcactctggagcggatcgtcacctgtgtgcccggtgtcagatctccgatgttctgctcgctgatctttcctttgattctgtattttcctgtagaaaggatactcataaacggttgggactctcctgtagaagggtctgttccctgctgttcgttgatctcctgtacaattccggcaactgtagaagttactgtagactgttccaggctcttctgtgtacggtttacttccagctcttttactttataattgtactcttcctgcttgatctccatctgaagttcctggatctgtgtcgtataggacagctgttcgctggccggcgcactcttcttctccgttgtaagtgtcgcgatctgtgaattcaggctgctgatgttgttcgtgatcttctcaagctccagttttccctgatctaatgtcatagcaagctcttctgtatcgtattcaaacaactttgttccaggctctacttcctgccctttttcaacaaagatctgttttaccttctggttgtctgccagtgtcagtttcaacgtatcctgtgcttcaaccactcctgtaaaacggttctgtgtcccaagtcctgtccctgtgatcattccgacggaatccgcatagagaacattctctccatctgctccacttccacctgtcagattcttcacaaagatcagggcgatcactgccacaaggaagatacctccgccgatcaacattccttttttctgttttgtatccaatcttcttttttctttcggctgactggagctctgtgtgtcggatgactgctttctgattccccgcatcgtttgccctcctgctttattttatttttacttctttttgtgcaaaaagttcaagtcgaacgtccgtgagacttggcgcgtgattctggtcagcgaagctgacatattcctatcagaatcactgcgcatcctcgcggagcgtttatctcagtcggagattggactcccactgagataaatttgctattactcaccacctgaagaagtgggagtcttctcgactgagataaaatctccgggacatccggtacaatctgcacaaaatattctctcataccatcagtatacaggaaatgtgcctaaaaagacattgatattttcttaagattttttatcttttttctatagccggctcacagactccttctgccccggcaagcagaatcatcagaagcaaatctctctgtggtccaagccatgcttcttttggctcgtaccattcctgaagggtatggattccgtcttcttctccacctcttccaacagtgattgccgggattcccatactgatcgggatattcgcatctgtactgctctcataccgatactccggttcaattcccagcagttctgccgcccagaatgctgctttcacgattgcacagtcctttggctgtgcccccgccggtctcacaccgcgtccttcgatctgcactttgatctgcggctttgaagcatcccatcttgcattttcttcttccactgcctgtttgatcactttatgaagttctttgtccaatcggttcagctcttcttcgctgtccgaacgaaggtctaccagcatggatgcagaacctgaaattgtatttacagaagttcctccctggatcacgcctacgttaaatgtcgtcttcggctcatccggaacctggaattctgcgatctgtgcgatggctcgtcccattgcatggattggattaggaatgccaaagttctggaaactgtgaccacctcttccggtaaatgtcacctcataacggtgacttcctgttgccgtatagatcaccccgcccgtatactggttatcaatcgagacaaatgcatctacctctggacattcttctgaagctttgttgtcgtatccgaacagatacttcacgccccttagatctccaagtccttcttcacacacatttgcacagaagatcaagtctccttttgtgtgaagatctgcatggatcattgctttcgctactgcgatcatctccgccactgcatgtgtgtcatcgttaatgccggggcaataataacgattcccttcttttcttatcgtcagatctgtcccttccgggaatactgtgtctgtgtgtgctgcaagcattacacttggtccttcaccggttcccggccagatcccaagcacatttccaacagcgtcaatcctgacatccctaagcccgatctcccggaaccgctcccggatatactccgcttttttctcttccttataagaaggtgccggaatctgacacatattgagcgtgtcctgagtcgttgccggatcttcttcctttatatattccaatgcctgttttattttttcattttcaagaatcatttccctgtttcccttcgttctgtgtactttgtattttgctgtaataaacacttttagtatatcatattttcttaatgataccgtgattttgcgaattttctataacagtaatttttttattgaactttttcatttatcgtggtatactctgactaaagttttgaacttttaaattgaactttttagagattttcgtattgaagcagattctaaattgaactttgtgttttgttaatactttattgatggggtctgacctctggaaagatgaccccagaaaggagctttatggaaacctttgcagacagattaaaagccgctatgaacgagcaaggcctgaagcaggttgatcttgttcgtcttgcccagcagaaagggatcaagcttgggaaaagtcatgtcagccagtatgtcagtgggaagacaatcccgcgtaccgacatcttacattttctggcagatgccctgcaggttgaccctgactggttaaacaataataatgataatgattccacactgtcagatgttgataagatacagacatccgcagataattcaggaggtatgaaagtgagagaattcaagaaatcatccaagttaaataatgtattatatgatgtgagaggtccggttgttgatgaggctgccaaaatggaagagatgggaactcatgtactgaagcttaatatcggaaatccggctccgtttggcttccgtacaccggatgaggtgatctatgacatgagccgtcagctttctgactgcgaaggctactctgcttctgccggtctgttctctgcgcgaaaagcgatcatgcagtatgcccagttaaagcacctgccaaatgtaacgatgagcgatatttacacaggaaatggtgtcagtgaactgatcaatcttacgatgtctgctcttttggatacaggcgatgagattcttatcccgtctccggattatccgctctggacagcttgtgctacacttgccggtggaaagcctgtgcactatatctgtgatgagcagtctgactggtatccggatatcgaagatatgcgtaagaagatcaatgaccgtacaaaagcgatcgttatcatcaacccaaacaatccgaccggtgctctttatccgaaggaagtactgcagcagattgtagacctcgcaagagaacaccaactgatcattttctctgatgagatttatgaccgtcttgttatggatggaaaagagcatgtttctatcgcttctcttgcaccggatctgttctgcgtgacattcagcggactgtccaagtcccatatgatcgccggattccgtatcggatggatgatcttaagtggaaataaaaatattgcaagagactatatcgaaggaatcaagatgctttccaacatgcgtctttgctctaacgttccggcgcagtccattgtgcagacagctctcggcggacaccagagtgtaaatgattatattgttccgggtggacgtatttacgagcagcgtgaatatgtttacaaggctctgacggatattccgggaatcagcgcagtaaaaccgcaggctgcattttatatgttcccgaagattgatacgaagaagttcaatattgtgaatgatgagaaatttgctcttgatctgcttcgtgacaagaagatcctgattgttcagggaagtggattcaactggcatcagccggatcatttccgcgtggtttatctgccgcgtattgaagtactgaaagaggcggttggtaaaatcggggagttcctgcagtattatagacaataagaattaaactttatttatataaaaaccgggtcaccacaatcaagaatttgtgttaacccggtttttattattataatacgattaataacgcagcaattaatagaagcattaatactatataaatcgcaactatcttcttattgcatgtcttatgattaataaacatcattatcaatcctaaaaataaacatatcactattcctaatgataaattcattactatcacatattttgtattcgcaaattgttttcccaaattactaaaattaactgtaattaacgaaaacactgaaacaaaaattcccatgagtgttagtatattagcatatatatgatttattttctcatccaaatcattattggcattatttattctaccaattctctcttcatactcatccttataattagccattcctctatactgatcttcatcattaaaagaggcattctgctgttcattataagtatgctctggttcttcgcttaattgttcaaaaaatatctgagcaattttatcacccttttttatcttaattgtactagcagtaatattctgaactcgcaaataaatatatgtttcatgtcccggaaaataatgtggtcctgacacaattaacccctgtcgcattctagaattcttttcaccaatacgtcccatcaaatcattcggcatatggattttttctgacatcttaacgaaaatcatttcattagaacgtagtatataggaatctactaaagcatcttgctctacaataccttcaatgtgtaggtcatatgatactgcattaacactagactcatcataacatccatcacagaatatctccgaatggcgattttttatatttttatcaactaaaatcatatttttgcctcccttgatggatattattataacacagaatatatgaatttcaacatctatacattcttaacagaagccttctacaaagataccagttactgttcacacaatgtgcgaccagcaacgcatcctccgtgtcaatcagcggagtgattgacacgggagtgaacagtaacagataccacacttaatactatcatttatgccccaactttatccaagcagttctcttaccatctctgcatcaaattcaactttctccacatgattcacttcaatctgatacagcgcattcgctgcgatgtgttctgctgcctgttccagatcacggattcctgatgtgttggagtacagttcaatcacttcattgagtgcctcatctgtcataatgcactcttctgccttcaggctcatgcgtttcagcaccttcggaagtgcgaatttggagaagattactttcttctcttccggtgtataatccgggatatcaatgacagcgaaacgggacatgagcggtgcactgatctgatccttgtcattcgctgtagcgattggatatacaccaacggtaggaatcatacactccatgtaattgtctgtaaatccaaggttgtccagcagtgtaagtaaaacatctgccgggtttccatttccctttccggatgccgccttatccagctcattaataataaataccagattggattcccctgccatggagaatgcttccatgataatacctggctttgcgtttgaatagattcttgaacttcctgtcagctgttccggatcgttaatggaactcatgtccagtgttgtccaaggaagtttaaggattcttgcaacggcataagcaatctgagatttacctgttccggccggtccgacaagcagaaggccgtacgccggaagtgtgtgtgtacggttgatctgaatgatcgtctctatgattctctgctttactttctccattccatacagctcttcatccagaattcttctcgcttcatccggatcgattgcttcaaagtaattactcttccactgaatattcatcatgatagaaagtgctctctgtgcgtgacggcgctcttcctgagagacctcgtgagaacgtgcaactgcaagatttcttcttgcccacagacgaatgttatccggaagtgtacgtcctgcgcacgtcataaagtctgtaatactctgaatacttgtaagcttcatgtcatctccggactcttcctgctcgtcatcattgatctcttcttttggcgcatcacttgcaaacagccgctcgatcataaactgaaggaagccgtcctcagcagataattttgttccgcctccaaatgcaatctcacggattctgtaaacggcataaccatccggcttattttctccggaaagacgtacattaatgtgattttctccaagccattttaaaaggctgacaaaacgtgcatccactttcaggatatctgcactgcacgttccgtccttttcatcaaactcaaatgcggtctgcttattctgattggtaaacacaccgcaggaatgatgattccacttccggttctgattatccagaacaagaatcggacactccggtgttgcatggtcttcgttggaacaaaatgttgtataagtacactgaacttctttcttatcttccggtgcactgttaaagtcaaatactggcatactttcatctcctcgtgttttgttttcagaaacattactattctaccacaaactttttgaaagaaaaaggaagaatattatgcatattccaggtttatttctatcgaatatcttaagatatcctaaaacttggctacatttcttgtaacttgtatctttttatgctacgatacttttcagaaggatcttgtcaacttctgacatttttcgaactaattcatgcaaaggagaatcttctatgaaaatctgtccaaaatgtaattcactctgcgaagacagtgcttctttctgtcaggaatgcggtgctccgcttcctgctcctgatgataatgctcatacacaggagaatcaaacgcagcaggaaagccagttccagcagaatgcatattaccagaatgcataccagaacaactataatcagaacaattattaccggaacggggcaactgcaggcattatgccacgtaatcttgtacttgcaattgttttttcttttctcacctgcggcatctacagtatctactggatgatcaagctgaatgatgaggtgaatcagctggccggagagccacaggcaacaagcggaggcatggtattcctattttctttgatcacctgtggaatctatggtatttactgggcttataagatgggagaacgctgtgaccgcatcagaggaatacaggggaattcttctattctctacctggttctctcgattttaggattagatattgtatatttctgcttattgcaggatatgatcaacaaagaggtatcttaatgcaaagaggatacatagaaattcttgtcacatacaagttttctatgtatcctctttcttctatctttctattgcattagacatggaaacatccaccgccaataaattctctcaaaagtgaattcgttggcacattgtcatttccgattcctacgaaataatccaggaatttcaacaaccgctttgcttcaacatattccggagagtctttgcttacgccaagaagcaacggctctacatactgtttcaacactgccagttcatagatcagggaagagttaaacatcacatctgcatattcctgatatgggaaaatattcttctcttctcctcttctcactgacggccacattgagatggtcttcgtcgccgatgcccctcttgttcttgcatccctgacaagtcttcggatcaaacgtccgtctgtagacggaatccggttatgctcatcaatgttcagctgtgttaatgcactgatatagatcctgaatttccggtcatcacataactgttctgtcagcttcggattcaggcaatggattccttcgattacaaggatatcattttcaccgagtttctttggctttgtttcaaaattccgtttaccggtcttaaagtcaaaaaccggaagatagacttcctcgcctgccagcagattgctcatgtcctcattgaacttttccacatcgattgcttcaatgcattcgaagttataatttccatcctcgtctttcggtgttttctcccgatctacgaaataattatctacagaaatcgggtgtggatgaagcccgttcactctgagctgaatggataagcggtgtgaaaatgttgtcttgccggaagaagaaggtcctgcgatcagaacaaactttaccccctggcgatctgcgatctgctttgcgatctctccgatcttgcgctcctggaatgcctcctgcacaagaacaatctcacgcatatcatcctgcgtgatcatgtcattgagcgcaccgacggtatcaatcccctgctggtctccccatctcacagactcactgagtacacgaaacagcttatcctttggcacaaataaagggactttctccggttcgtctttcagcggcatctgaagtacaattccgccctgatacagatacaatgcaaaatacttcaaatctcctgtatccggcatcatatagccataataatagtcacgaaattcattcatggcatacagattcacgtgggaacttctccgataccggaacaggcgttctttatcaaacattccatatcgatggaataattccactgcctcttctgtatggatcaactcttttgtgattggaagtctctgctgtacaagttcatacatgcgttcttcaactttccattggaattccattcccacatgatcgattccttccaccgtacagtaaaatcctgcaccaagcgaaaaatgaatccttacccgcacctgctgcggacactcatgtccaatcacatcgtgtactgccttaataaaaagaaagcagacacttcttcgatacgtgtcataccccgccgtatcctgtgttgtaataaattgcagcgtacagtctccggaaacctgttttctaagttcttgcagacgatgtccatccagcatcacaagtgcgatctgatgtttatactctttctgaaaatccttcgcgatctcctgataagacgtccccttctcataaagatactcttttccgcttatcgtaaccttacatttctgactttccaactctcagccacctccactgtctttgtgaactgctttccactcacaactgcctgctgaacattattatgcgttcacttctgattatatgatctggaacggatgctcgattggatctgtaagtacatccagcaccggaagcttcttctcaaagaactgcttcatatcttcaataaaaatatattctgtgccataatgtcctgcatcaattactgcaagcccctgctctactgcatcaattccatcatgatgaccgatatctcctgtcacaagaacatctgcccccttctcgagagcaactgcaatcgaactctttcctgatcccggagaaattgcaagacgatgcaccttcttctgcatatctccaaatactttcagactcccaagttcaagtctgtgtttcacatagacacagcactcttccaatgtcatatctttctccagattaccgattcttccgattccttccggattcccttcttcatctgtataggtaacatctaacacttccccattctgaagatccatgatctttccggacagttctgccataccaagcacatcataattcgtatgcattgcataataggaaatgtcgttctggatcagctttacaattcttcttgtaataaaatcttcatctgtcactttctttactgctgagaataaaagcgggtgatgtgtgatcagcatgtccgcgccttccttgatcgcacggtcgatcacaacatctgttgcatccagtgccagataaattctggacacctctttctctgaacgtcctgcaagcagtcctacattgtcaaatcccaaagctgctgttcgcgggaatgttgcctctattacctgtataatctctttacactgcataatatttcatccctttctctgcttctacaagttcctgttccaattcttcttttctctgacggatccggtcagaatctttcgctttcaatccttctaaaatactttgataaatgcgtatctctctttccagatactctctgagtaccggatgttgtttctccagcaaaagctttccatattttaactgaaccgtatcccagcactttacttctgcatcttcgcctgctgtatcagctaccggtggtcttaccttcatcataggataatattttccatcttcacagaccatatcttcttccagaaattcatatcccttctcaagaagaaatgcccgcactttctcaatctctgactgtggctgaaggatacactcctcaagctttcgcaccacttccgctccttctgtcaggatccggatcacaagtccgcctcccattcctgcgatgaccgcagactggacttctcccggctgtaatgcctgaaatccattggaaagtctcgtctctatctctgcttcaagtccattctcgcggatatgttcctctgctcgctgcaatggtccttcattgacatcaagtgcaactgcttctgtaatcttcttctgctgtgtcagataaatcggaatatatgcatgatccgttccaatgtccgctaatttataatgggcggtcacaagatctgcgaccgcctgtaatcttttcgataattccatcattaatccagataatccctcagttttctgcttctgcttgggtgacggagcttacggagtgctttcgcctcgatctgacggatacgctctcttgttacatcaaactctcgtcctacctcttcaagtgtacgtgctcttccgtcattcattccgaaacgaagacggaggactttctgctctctctctgtcaatgtatccagtacttcatccagctgctctttcagaagtgtctgtgcagccgcctctgccggaaccggtacattatcatcctggataaagtctccaaggtggctgtcttcctcttcaccgattggtgtctcaagagaaaccggttcctgtgaaatcttcaggatctcacgtacacgttctaccggcatatccatctccttggcaatctcttccggaagcggttctcttcccagttcctgaagaagctgtctggatacacggatcagcttgttaatcgtctcaaccatatgaaccgggatacggattgttcttgcctgatccgcaatcgctcttgtgatcgcctgacggatccaccatgtagcataagtactgaacttatatcccttgtgataatcaaacttttcaactgctttgatcagaccgaggttaccctcctggatcagatcaaggaataacatgcctcttccaacatatctctttgcaatgctgactacaagtcttaagttcgcttctgcaagctctttcttagcttcctcatcgccttcttccattctctgtgcaagctcaatctcacgttccgcactcagaagaggtaccttaccaatctcttttaaatacatacggaccggatcttcaatactcacgccttccggaactgacaggtcgatattctccatatccacgtcgtcttcctctgatatgataatgtcatccagatctacatccacctcatccggtgtatctccgctaatgcgcagcacatcaatgttatttgcctcaaggtaatcaaataccttctccatctgctctgcgttgagttccatatcattgaaaaaatcattgatctcctggacatccagtatgctctttttctttttaccaagtgcaaccaggtctttcaatctatcaagaaatttctgtgtaatatcgtccatgtgttcttccttccttcgctgcgcgcatccgcagcctgtcttgttttattttatccttattgaattgtaatattcaaattcttcaggttctccagcttccgtttttcttccatcaaatgctgtaacccccgcatatctgtcgggtcgagattcattgtctgatgctcaatgctataactcttcacccgcaggatcgtctcctgtaaagcctgttctctctcttcctttgtcttcagctctttgattcttgtgttaaacaaagaggctgcttctctgtgatcttcttcctctgtaaaatgattcaggatcttcgcaggattcaaggctccctgctttctctgctcatataaaagttctgcaaccgtccgatacagactttctgtaaaatcacccgggcttatgtactgactgatctgatcaaagagcctgtcatcatcgatcatccaggtcaacaatgctttctgtgaagtaaggattccgtcttccttttgcttcttctcagatccctctgcccgtttcggtcttgcgaccggtctcgccattccggcattcacagccatctttgcgaccatcttctccaagctttcccggctgacccggtatgctgttgcaacagcttcgatatagttgttacgctccagctcatcttcgaattcaagcagtctcctcgacacttccctgaagaaatctgtcttgccttccggagaattcatatcatattgtttctccaacatctccaggctgaacatgaatccattacgcgccgcatggatccgcttctcatattcttctgccccaaggttcttaatgaattcatccggatctttatatggatccatccttacaactttagcagaaatcccggcctcccgcaagatcggcactgcgcgaagtgctgctcttgtaccggcttcatcactgtcataagtcagataaacttcctggacataacgcttgatcagagctgcatgccctgctgtcaatgcagtccccaatgaagctaccgcattcgtaaatccggactgatggagagagatcacatccatatatccttcgcaaagaagaaagtatggctttcttgatgttctggcacggttcagaccataaaggttccggctcttatcaaaaacgactgtctccggtgaattcagatatttcggtttcccatctcccatcacacggccaccaaatccgatcacacggttattgacatccataattggaaacatcacacgattccaaaacttgtcgtacacaccctgacgttcatccgtgttgatcagtccggcctgtcgaatcaggtcttcactgtatcccttctctctcagatacttatacagatcatcactgtatttgttcgaaaatcccagtccaaacgctgtgatcgtctcatctgagagttcacggttcttaagataactgtaggcctgacttccacgctctgatttcagctgtacgtagaaatactttgcagccagcttattcatctcaagaatcgtagactttaaatctgctttttccttcgcttctttcgagtattccatctccggaagttcgattcctgctctgtccgcaagaaacttcactgcttctacaaaagaaaaattctcatattccataagaaatgtaaaaacattccctcccgccccacatccaaagcagtaatacatctgcttctgtctgctcacagaaaaagacggtgatttctcattatggaacggacataatccaaaataagagctgcctttcttctgcagccggacatatccggaaatcacatctacaatatcattccttgatcttacttcttcaatcagttcttctgagtagtacatgagtgcctccgcttaatgtttaaagaatactctattatatatattcgacaaaactcttctctttcctttttatttttttattttcttctttttttcttttccaatattattttccaagcagaacggttttatatattaggaaaggactttcctaatatataaaaaaaccaagaatactttgttctgtactcttggtcttatcttactgcggaagatgggacttgaacccacacgatcgcattgatcacaagatccttagtcttgctcgtctgccagttccgacacttccgcattctgaaatattttttgaaatgatgcggaagatgggacttgaacccacacgatcgcattgatcacaagatccttagtcttgctcgtctgccagttccgacacttccgcatttctaaaatatttttttgaaaatgatgcggaagatgggacttgaacccacacgatcgcattgatcacaagatccttagtcttgctcgtctgccagttccgacacttccgcatatcatcattttactgtggtcatctgcgttaccgccttgccacaacgactataatacacgttgcggcattaaatgtcaacagtttttttaatttttttaaaaatttattttttatatacaattaatacaataagaaaacccggtcttccgaagaaaaccgggcgaaaatacaagctcaaattaagcaagtttctcttttgctactgctgcgagtgctgcgaatccttctctgtcgcttactgcaagctctgcaagcatctttctgttcatgtcaacgttagccagtttaagaccatacatgaatttgctgtaagaaagtccattcattcttgcagctgcgttaatacgagcgatccaaagctgtctcatctgacgcttacgctgttttcttcctgcgtaagaagatgtgagtgctctcattacagactgttttgcaactctgtactgtttggaacgagctcctctgtatcctttagccagtttcagtgttctgttatgtttcttcttagcgttcattccgcctttgattcttgccatttcctaatctcctccttaatctacttccaaatcttacagatatggtaaaaccttcttcatgttctttacatttgttgcatctgtaatagttgcctgtctcagatttctctttctctttgtagacttctttgttaagatatggctcttgtaagctttatttcttttcagctttcctgtacctgttactttgaagcgctttgctgccgctctatttgttttaatttttggcatgataatttcctcctttattgtgctgccttacaggatcttcatcccggatcatattgtcttaacgtttttcagctaaaaccatactcatatttctgccttccagttttgctgccttttctactgtagcaacatcttccagctgctttgcaaaatcatcaaggatatgcttgctctgctgtacgtgagccatctcacgacctctgaaacgcagtgtcaccttaaccttatttcccttggaaatgaacttcttagcattgttcactttggtattcaggtcattcgtatcaatgttcggtgataaacgcacttctttgatttcaacagttttctgtttcttcttggcttctttctctttacgagtctgctcgtatttgtacttgccatagtcaatgatcttacataccggcggctttgctcccggtgcaatcttcaccagatcaagctctgcttcctgtgcaagcttcattgcatctctggatgacatgatgcctaactgttccccatccgcgctgatcaatcttacttctttatctctgatctgctcgttaatcattaaatcgctaattgtcgtatacctccgtcaaatgaatttcctttaggttcttacgcgaaaacacaaaaaaacgagtgaatatcatatccacccgacaaatgtaataactccaacaggagctccttattatcgatatcggaccatcagtcactcaattgtgctgcggtgagagtggatactctactttgttttttgcttaacgcaacatctaatctaccatatccactctttcctgtcaacactttaaatgcattttcttttgtttttttatttttttcgaaatttatctttcatttcccatgcagaatacggcaacaacacccggtcctgtatgacttccgatcactgttccgatattattgatcagaatattctctattcccatcttctctctgacacgtccggcaacatactctgcatctttcaggcaatctccgtgcgtgatcattataatctcattctcccagcctttcgactgttctactgccatatcaacaattttattcagagacttcttgcgaccacgttctttcgcaatcacctgaagttttccattgttatccatatgtatgatcggtttcacttgcacgagtgtccccaaaactgctgccgctttggaaatacgtccacctctctgcagatgattcagatcatccaccgtaacattatggcaaacgtgaagcttgttctcttctgcccactttgcgatctcatcaatcgtcttgccttcttctttcaacttaagagcatagtacaaaagcaagccctctcccaggcaggcgcaaagtgtatcgatcacgataatctttgcttccggataatcctccgccagttcttccgccgcgattcgcatactattgcatgttccgcttaatccggaagaaaatccaagatgaagtacatcttttccttccttcacaaacggttcaagcatctcgcgtgcttcctccggattgatctgagaagtcacagacatatggccttctcttaatttctgaaagaactcttttgctgtcaatcctgacatatctgtgtaagtttctccatcaatcgtatatttcaacggaagaaccggaacatgtctctcttccagccattccttcggtaagtctacagtactgttcacggtaataatgaactctctcatgtcaataacctcctgctctctttcttccggaaaccaccactacattccatatagcagacatgtatttttccggataagcaatattttctatatcataccatcttttataataaagagcaaagatatattaacaaaattaagattttgtcagttaatttttacatttagataatttcttcctgaaagtgttttattaaacacgaggaaacataataccaaaatacatcccacaacaaatccatacagattaaacactgcagtcagtacaagaagcatcagtctcataaattttaatgcatatccaagttcgaaattcggctgtgtataatttgccactgccacaaatgccatatatagcattacttctgaattgaaccaaccggattctaccgaaaattctcccatcacaataccggcgatcacactcagtggagtactgagcatcgttggcgtattcatcgcagccagccgtaaaccatcaattgacagttcaagcagaagaaactgccagatcaatggaagattgatctgatcacgcaccattacaaatgaaaaaacgcccggtagccactgcggattctgcatatataatagatacaatggtgtaaaaaacaccgttgcgattgtgatcagggttctggaaatcttcagatacattccggtcaacgtcggaaaataataatcatttgcctcttctatcatatccagaacagacgttggaagtatcattgccgacggcgagttatccaccagaatcacaacctttccttccaaaagacaggctgctgccgtatccggtctctctgtaaatttaaacttcgggaaaggattgaaccattttctcttgaaaagtgcttctgcaagactctgctgattcattctcaggtcatctacctcaagtttctcaatccttgattttatattgtttaaaagttcttcatctacacggtctgacatataacagactgctatgtccgttctggaactctgacctgcttctgtcatttccataatcagatgtggatctctgatccttctacgcatcagtgccgtattaaatacaattgtctctacaaaaccatctctggaaccgcgaagcgatttatctttatccggctcgtctacaccgcgggcaggataacttctgcagtccatacacagtgccgcatcataaccctctacaaaaaacaccgctgtaccggagagtacattcctcagaatatcatcaaaacatttcaacacatccacttctacataaggaatcttctgttttgaaaaagtttccgcatcctgtgggagatcttctgctgtaatagaaagaaaagaatccataatctttaacattgcttcatcttttataaatccatcaatgtagtagaataccgattcttttccaccgatctccatctcccggcggataatgtcaaagcttttctccaccggaagggtctgatccatatattgaatattttctttaaaagaacaaccgacttcttttttaatctttttgatcataaaacctaaccctcttttttctgcctcttatttgccttggcttcactgagtttaggtttccctttttcttacaaattattctgtcagccttttatttcttttttgttgtacttccaaatccaccatttcttacttctgtcacgtcatcatctaatgtaattccgtactgtacgaagattccctgcatgaatccatctcctgcttctacttctacggtttttccttcattagaatcatttgtgatctttgcaaagatctgtccttcattgtcggaataataataatcgctgtcgataattcctactgtattgttcagctgcagtctgtacttgaatcccagtccgcttctcggataacacttcagtacccagtcctgttccatccacacacggactcccgttggaatcttgacggtttctcccggtttcagtgtgatttttaccggtgcaaaaaagtcatatcctgcacttccggctgtcgctcttcccggcagttttaaagactcgtagattgcttccatctctttttcttccgctgtctcaaatgtgtctttccacccttcaaagaacttttctttactcactttttcaaatcttgcaattcgattcatctctgttaataacctccaatttattttcacattttgtaactgttcagagccaagcaaaatttcaaaaaagatgtaaaatgcttgtatttttaagactgtttttgaaattttatttggcggatacgccacaccttcaaaatgcgtagcattttgaaggttggttctgaacagttaccacatttttatctgttttcttgtcttgtatacaggaagtttattctttcctgcccgcaagcactgtaattcattattataaaatacttgaaagtaaaaaacaagttgatgaaataattctcttgagatattctgtgtttagagtataatagattctatagacacgaaacagaaggtgagagtatgcgaacaatggactttactacagaacagccagattgctgctctgtcggtgattatttggagattgtcgaacatgagcttcccacttcctattggtatatgctcgagcatgcctacggtgcaagcacgaatttcaagaaccgggaacgcttgaagacccgcaaaggcaaagtcattaagatctggaaggacgacagattcaactatatcaccctggaatttgatgaagaggatgtgaaatgatgtacaacaaagatgatgttatatatattcttgagaataacacaacaatccgtaaaggaaagattgcacgcaagcagggggataactatatcattcagctgatcggctcctgcggcgcactgacaatgccggaagatcagctatttgaatctgaagaagctgctgaaaagagcagacagcagatcaagctgaacagcgcggatgtacagaatgatttcatatctgtaaaaccggatcctttcgacaactggattgggcgataggaattgagttcagagcactaatgaaatgaccgacaggtttttcctgccggccattttttatctctgattatttttctatcctattttgctttaccataaacatattttcctgtctgtccaacgatcatcttaccatcagcattcttgtaatatggaaatacccagtaaaagttccactccttctttgatgctttcttgtctatataacctgtctttgaagtcatacctatatatccatactttccgctttctgtttttccataaatgagataaccttctgcatctgctgatttcgtccatgtaagttttacagccccattctgacttaccgctttcagattagttacactcgcacagattccctttgcatatacataagcaggcgatttccctacgatacgattaccatctgcccccatcacataaggatatacccaatagaagttataatcattatccaatgctttcttatctacaaacgaagtcttagaagtcattccacaatatccatatttttttatttttctgtgcataaatcagatatccgtctgcagctgctgattttgtccaagatactaagaccttattcttcccgttagagcttgccctcaaatcgcttactgtattcagcatagtaagatcatatggatctatactgtacattttcggagaggcactgtttgtcacatacccatttcacgcccctgtcactatagagaacaggctggcaatcagacagtctgtacgacaacgttattgcttttgaaatcgttgctgctccagaatctatggtcattgctttcgtaacgactttatttgtcgataaatccttctcttcccacattactaaaaacaaattctcactgatttttgtcatttgtggtgtactacaggtaattgaatcaccggatttgtactgtgccaatccaactattttcgaattattaaaataactgtctgtcacacttacataaatatttctagaccttgttttcggtttgttgttgctcataaagttttccagttcatcaagcttccgtccaagctcgtcaaatctcttcataaacgcttctgtcgcatcgtcagatagtcctattttcatctctgattgagtagacggtaaattctctgtctgctgattttgaacaggcttaaagacgattgtctgaatagttccgttggcagtccatgacttcaaatagatttctgacaaatcatttttaagaaacagcgcataaggagcattcattgggacgtcgcttgcctgtatcgtctcttgaccatcaacaatgtgaccaatcagttgcggttgctgaatctgctgcggtacctgttgcatctgattgtaagcaaactgttgagattgcatctgttgaactggttgctgatatggatttccgtacctctgctgattctgctgcaagtacggatttccaaaatatggattctcgtacatgatagacctcctatctttcacacacatcctcaagtatctcttcttttgaagcaaacggtttatcagtgtaaactcttctgtcaatcacatcttctacaacatgaacaaccgttgactgatattcaagtgggatgccattgagacgatcatcactgaatatctgaacaagtatcgcatctgaaaacatttgaccgcctccttatgattaaattttcgcataaaaaaagagaagcaagttttcactttcttctcatatttatgtcatatagtggctctattttatttactattttgcgtacacactttcgctgtgtaaatacgtgtaattttataaaattcagtgtgtatgccaaattgcttgaaacccttataaactcagtgttagaacggtgttccatacagatcataaggtgtcacctgatatacgtaataattcaaccagttcgtatacaggttattgcaatgcgctctccaggtcagcattggtttcttctctggatcgtcgttcggataataattctccggaatctgtggattcaatcctttccccagatctctcttatactcggaatccagtgtcattctatcatactccggatgtcccattacaaagatctgacgtccatcctgcgccatgcaaagataaactcctgcttcttccgaatctgcaagaattgtaattctgtcatctttttccaatagatcttgcggaacttctgtatgtctggaatgcggtgccagaaacttatcatcaaatcctctgacgatcggaatctttctgttccttacgtggtgccagaacaaacctgaacgtttttccggaagttgtaccttatcaattccataatgataataaataccagcctgtgctccccaacaaaggtgaagtgtagacacaacatttgtctttgtccactccataatacgtttcagttcttcccaataatctacatcttcaaacggcatctgttctacaggtgcgcccgtgataataaatccgtcaaactttttacccttgatatcatcaaacgcttcatagaacttataaatgtgacttgttgatgtattctttgacacatgacttgtcactcttacgaaagtaacatccacctgcagcggagaatttgaaagtgctctcagaatctgaagctctgtatcttccttaagtggcatcagattcagaagtccgatactaatcggacggatatcctgatgtgccgcacgcatctcatccatcacgaagatgttctcttgttccaatatttcctttaccggcaaatcattttgtactcgaatcggcattgtccttatctcccttttcttcttgtatttcttttatctcttcctgtttttctttctgtatataaattccttcggaatctacatatccgttcttcccatagcactctgtatctgttggaagttcttttttcttcaggatagaattaaccagcatatttacaatataataaatcaccgcaaatgtcggtacaccaaaaagcattcccggaataccaaataatccccctgcgatcaggattgagaaaacaacccagaacgaggaaagtcctgtcgaatttcctaaaatctttggtcccagcacatttccatcaaactgctgcaatgcaataacaaaaatgataaaatagagtcctttcaatggatctgcaagcagaatcagaattgcactcggaattgctccgatatacggtccaaagaatggaattacatttgtcactcctacgatcacgctgaccagcattgtatatggcatatttagaattgataatcctataaaacagattactccgataatcagagaatcaataatctttccgataataaatccaccgaagatctcattgctttttccgccaatctggagaatcatattagcctgtcccggacgaaatacagcgtagatcagcttctttgtctgtttctggaacttctctttgctaaacaaaacataaatagagacaatgattccaataataaaattaaagacttcacgaaccatctgaatcattcccacagtaagctgtgtcatccacagattcactttctccatcaaatctgtcttcatccagttctgaacaaaatcacttgcttcttcaactatgctctccaacatctttccaactgttgaatcagaagaatgcatcttactgaattcatggataaaccggttcatctgactcggcacattgaaaatcatgtcgcggatacttccatataactccggaatcatcatattgagaagtgtagtaatcaatgccaacattaagatgacagatacgaagattccaactcctcttgatatctgttttttcttctttaatttgggacaatgtttctccaaaagcggaatcatccgacggtctatccacttcacaatcggattcagcaaatatgcaattgccagtccataaataataggttttgccactgttaaaaactgcttaaatacagatgaaatctgtcccaatctcaaaagtgcaaaataaaataagatacatgtcgcaactacgaagaacaacgtcatactttttatggtctgttctttgaagctataccttcttttttcatgctcttcccacgaattgtgcctataactttgatctgtatgagtctttgacgcctctttcgctgtcgtatgctcatcctgtcgatattcactcatgtacgatcatttcctttcttctgttaaatatacatattacgattataacgcggttgcaataatagagtcaacagtagaaaaaagagattcagaagatcctctcttccaaatctctttctatttattacgattttatacttttatctgatactcaattacagcaacaatcaaatgttgcacattctgtcccactgctgtggcaggcgtcaccgccttctacactgattttccctgcgtgacatttgcactcttcattatatctgcaatctttcgcctggcagtcaacatctgagcaatctgaaacagacttcatcgaatccgtcttattgctataacttccctctcttctttcttcaaagctatcgcaacaggtctcctgcgcatccttcgcactgcttcctcccacctggatcttatccagttcgcaaagatactgataattgtgtacacatgtctgtacggtacagcttaattctggcatactgatttcctcctcttaatcttattagaacaatatcagtatgtccctttcttttaaatatatacacttatatccaaaaacacaaaacggtatgtatctctcaatacataccgccagtaatctgattcttatgcgttctttccacagcagaatttatatttttttccacttccgcacggacatggatcatttcttccgatctttttcgctttgcgaactgtaccggactgtttctgctcgcggtacagacgtttctttgtctctgcatcaaagatcttatcccactgtgggagtccatacagccagtcagcttttgcatcgatcatgttcttataaagaagttctttatcaaatgcaaggcttacaactgtatcttcttccattgtctcgatcgggtttgctgtcttcagactgtcattgattccgtcaaggaatccaaccattgtcatgacatcctgtccatatttctcagcaagctctttcactgttcccttcacttcttcatccgggttctcgagcagctgctcgtaaatctctctttcgattgtaaagtatgttccccagaacttctccagctgatctttcggaagattacggtcataggccatgtcacgccactggtctaataaacatttctcactcattgtatattgctcctttatctttaaacttcgaattcaatcgcccttttattatataacaaattttatttgccgtaaacaattatttgatatatactgttactattactatattggcgtatgaaaggactggtcacatgaaaaaactgaaacgtatttctgcactgttaggggtttttattcttatcgcaatgtatttgtgcacactgatttttgcactgattgattcacctgttgcttctgatcttctcaaagcatctatcgctgcaaccattttcgttcctgttattctctatggactgctgctggtcacacgactgttgaaagatgattcaaaagacaattctgatcataaataaaatactgcagtcagtaatgcactgacagaatctactccccgggcgacatgcgaagctgtttcccgggtttttactgcctgtctcctcttcagatattcttccatggataaattttctctgtctttttcattgctgttctgttccatcgaattcctccttcttttttctcagctatatattatatgaggaactttctgatttattactatctttttgttttccgcgcagatcccacgaggagcaacaactacattgtacgcccagtgttcattctgaacgaagtgtttttatatcagaaaagaattttctgatataacaaagaatgtgccttggcacattctggcgcctgcggcggtcgcttgcgacacctaccttgtacgccgcagtgcgcatccctagcggagcgtttttatatattaggaaagaactttcctaatatataaaaaatacaggacggtaagctttcacttcctgtcctgtatttctgtttcattatttattacgataaataatatcgtctcttcctggtccgttactgatcattgtgatcggatactcgatctctttctcgatgaattcaatgtatttacggcagttttccggaagatcttcgtagtttttgattccacgaatgtcttctttccatcccggaagaactttgtaaaccggttttgccttctcaagaagatgtgttaccgggaattctgtagtaacttctccgttgatctcataaccaacacataccggaatctcatccagatatccaagtacatcgagtactgtaaatgctacatctgttgttccctgcattctgcagccatatttggatgcaacacagtcaaaccatcccattcttcttggacgtcctgttgtagcgccgaactctccgccgtcaccaccacgtcttctaagctcgtctgcttcctctccaaagatctcgcttacgaaagctccggctcctactgcacttgagtacgctttacatactgtaacgatctgcttgatctcgtatggtgggattcctgctccgatcgcaccgtatcctgcaagtgttgaggaagatgtaaccattggataaattccgtgatccggatctttcatggatcctaactgtccttcaagaagaactgtctttccttctttgattgcctcgtgaagataaagagatacattagctacaaacggctctaccattttcttatattccatcagttcgttatataactcatcaggattaatcagtggtttgtggtataaatgctcaagcagtacattcttctgctctgccacgcgcacaaccttctccttcaaaagttcatcatcaaacagctcactaacctgaaaaccgatctttgcatacttatctgaatagaacggagcaattcctgactttgtggaaccgaaagattttcctccgagtctctcttcttcatatgcgtcaaaattcttgtgataagacattaccatctgtgctctgtcggatacaagaatcttcggcatcggaacacctttttctactatagactgtacctctgcgaaaagacgcggcacatccagtgcgacaccattaccaatgatgctggtcgtatgtccatagaacacacctgatggcagtgtatgcagcgcaaattttccgtaatcattcacaattgtatggcctgcattcgcaccaccctgaaaacgaacgatgatatctgcctctctggcgagcatgtctgtgatcttaccctttccttcatcgccccagtttgcaccaactactgcttttaccatttcaaaccctcctgcgtatgtttgcttgtaaataatattaatcagcggtacttataaccattaccgccttaagaattatactatacttttgcagggttgtaaaatgttatttcgcatttttttatttaaatgtcagaaatattgtatttctgcgataaaagtattacaatgaaaagtaaatcaggcggttttcccctgagagcaaactgtttatcagtatgaaatttagtttaatagaagggagactatagaattgaaaaaattaatcaaatggatagttggacttggcactgttggtactgcaatcggacttcttgctgttcgtctgatcaaaaaatcaaagagtacatcctctgatataaaagcagatagcaccgatagcaataaagaagaaacgaattccgatacatttgatctggatcaggatcttgaaccaacacaggaaagatcttatgtatctttgcaggcagcccgaccagatgatttaactgaaaaatctgatgttgacagcgctgactcttctgaagcagaaacacaaccagcagtttctgatgaatcagatgatacgattgctgaaaatgaataataaaaaagaaaacggatcgttcaatcttacacttagtaaaattgaacgatccgcttctcttttttattaaaatacagcctgtttttctatcatctattcccatgccttacagagtagttgaactgctgcacggattctctcctcattcatgtttgcataacctaacagaatcaccgcttttcctgtactgtcttcattatcttttacacaatactctgataaaccataaactctgacaccttgtttcgctgctttttcaatcaaatccttttcggaatcatccgtcttaaaatgcagcaacaggtgaacacctgcattttctccggaaatttccagaatctctttcatcttccgaaggctactgatcagaacatcatgcctgttcttatataatgcgcgtgttttattcagatgtcgctcataatagccttcttccataaatttctgaagaatcatctgatccaccttggagacagtagaactgatgaatctgcatttttcctgataaattttcaaaatatgttccggaagcaccatatagctcattcgaatagaaggtgccagtgatttagaaaaggtacctgtataaatcactttcccattgctatcacttccctgcagtgccggaatcggctttcctttatatcgaaattcactgtcgtaatcatcttcaataatatatctgccttccgccccatctgcccatttcaaaagttccattcttctttgtatcggcataacacatccaagtggatactgatgagacggcatgacaaatgcaatatccgcccctgatttctctaattcatcaatccgcatcccgctttgatccatatcaacagtacagactttatagcttaatcgttcaaacaaacgataggcctgtccataggttgggttttccagcgcaactttatgaccatttccaatcactgtcgttaaaagcataagcaaataatcacttcctgctccaataatgatctgatccggatgacaatgtattcctcttgcctgatgcaaataactgctgatcgcattccgaagcccatattccccttgaggattgcccaatcggaacatctctgccttatcatctatcaggcattctttggataattttctccagatattatacggaaaactgttgagatccacaccgttcggagtgaaatcatacgcgtattctgtcactcctgaagaaatcggttcaactttgatctccggcctcttctgaagctgatatataccttcgatcttcgcgacaaaatatcctttgcatgggattgcctccacatacccttccgacaggagctgttcatatgcaagttctactgtactcctgctcactaccagatgcttactcaatgctcttgtagatggaagccgctctccactctgtattacgttattctgaatctcttccttgataaattcataaatctgttcgtacagcggagtttttgattttggattcaaactcattgtcaattcatacattcttgttctctccctgcatcacacctataactatgaaaaactgccgtgaacaatttctcattgtgatcacggcagtccgttttttatttcttcggcagtttgaaagaactcttcagagaaacaatacggttaaataccagattctccggtgtagaatcctttgcatcgatacagaaaaatccgtttcttacaaactggaagctatcataagctttcgcatctgcaaagcttggctccacataagcatctttgataatcttcagagaatttggattcaggttcagagaaccatcctctttattgtatacacccttctcttcatctacaaggttctcgtacagtcttacttctgctttctgtgcatatggtgccggaacccaatgaattgttcctttcaccttacgtcctgtaaatccacttccagcctttgtctcaggatcataagtacagtgaacttctgtcacgttaccattctcatcctttacaaagctttcacacttcacaaaatatgcgtgcatcagacgaacttcattccctgggaacaagcggaaatatttctttggcggttcttccatgaagtcatctctctcgatgtaaagttcacgacagaacggaactttacgctgtccgagttcttcgttctccagattattcgcaacatccagatattcaacttctccttccggatagttatcaatcacaagcttgatcggatcaagcacagccatcatacgggaacgcttcatcttcagatcctcacggatacagtactcaagcatcgcataatcaacagaactctggctcttggaaataccacacatatcaataaacatcttgattgactccggtgtaaatcctcttcttctgagcgctgcgatagaaaccagtcttggatcatcccagccatcaacaatcttatcttctacgagcttcttaatataacgctttcctgttacaacattcgtaagatacagttttgcgaactcaatctgacgcggtgggttctcgaattcacattcttttacaacccagtcataaagaggtctgtgatcttcaaactcaagtgtacagatggaatgtgtgattccctcgatcgcatcctcgatcggatgagcgaaatcatacattggataaatacaccacttatcacctgtattgtgatgtgtcatgcgagcaacacgataaatgatcgggtcacgcatattgatattcggtgatgccatatcaatctttgcacgaagcactttctccccgtctgcatactttccggcacgcatattctcaaaaagctcaaggttctcctctacagaacgatttctatatggactttcttttcctggttctgtaagtgttcctctatattcacgcatctgttctgctgtaagatcacagacaaatgcttttcctttcttgatcagcttcacagcgcactcatacatctgatcaaaataatcggatgcaaaataaagatgatccttccagtcagcacccagccacttaatatcctctttgatagactcaacaaattctgtcttctcctttgtcgggttcgtatcatcaaatctcatatggaattcaccattatacttttctgccagtccatagttcaaaaggatagacttcgcatgaccaatatgaaggtatccattcggctccggtgggaagcgggtgcatacatgatcgtaaactccttctgccagatccttatctatctcctgttcaataaaattctttgaaactgtttcgttctccatatcttcctcctactaaccataagtaccatccggatgatctgtcacattccttcggaagtgcgatttatcctacagcttttcatgctcaatatcttatcacataaaaagaacaaccacaagagattcttttcgtctccccttacagttgtccttttaaggttactgttcactcccgtgtcaatcactccgctgatggacacggaagatgcatgttttgccctgaatgcagcctgccttttaacaattcataagcctgtaccagaatagctgcatgatccactgcaattcctccaccttcttttacaacatagtatttttctctgaccaatcctgtccgctcctttttcaggataaccgcatttctcttctgatcctgattttgaattgtcagatgatattccgtcttttcccatccatcttcttcatatgctgtctccggttccatctctatctcaaaccatgctgcatctgccgcatcatctccggcctctacacttacatcagactcctttacgatagaaagatacgcacttgtaataatccttgctctcggatctctctgataatctccataacaggcaaactgttccaccggaagtccgctgactccggtctcttcctgcagttcccgtcttgctgtgtcctccagattctcccgtaaatttacaaatcctcccggaagagcccaacagccaatactgggatgatttcctctcttaaccaaaagcacctttaatcgtccttctttcagtgcctgttcatctttataagaaaaaacaactgtgtctgttgtacagcacggatttttatatcgatatggatcatattcttccagaaattcttccagtgtctgtcctttcccattccgttctcctgtcccataaaatggtgtgatatcttctaaaaatgatgccatatccatctctccttttcacttctttcaaagcactcccaacatactcatcgattcaaaaaacgaccgatttctgtcaaaagattcgcaaaataaacacaagttcctgcttctgcctccggatgtgatccttgaaaatcataacactgtactcccacaagcggcgcatgtgccttctcccaatcccgttccagaatctcatgaatctgttcttcatcttcttcgccgacccgaagaaaaatctcgatgttctgcctcatcgcatcaaaaaaatggtaaaattccggcagatattcttccatctcccatacaaactccgtaaacgtctgtaacacatctttcagttcttttaattcacttgtttcataattcttttcgctcatacggcttccccttatgcagaacccgtcaccttgaaccaccacttcaatcaaatccagtataacatatttcatgacaagtgaaagaattctcaacaaggaattgcattttttcttcaaacccgtaaacctataggaaaatctgcaatgagatttctgttggaatctatgaagatttgaagatctgcatcgcgaatctgctgaaataagaaaaaccccggaaacaccgcattcacgggcgattccggggaaaagttcaaagctgtctaggggacttgaacccccgacctccgccttaccaaggcgacgcgctaccgactgcgccaagacagcttattgcgttccagcagaacgcaaaattaaatatacactacttgagtttgattgtcaagttaaagctgatctgaatccagcaaaatggtaaatggcccgtcattgagcagctgaaccttcatatcagctccaaactctccggtctgtacttcatccactgattccctgcatttttcaatgatatattcatacatctcattcgccatatccggttttcctgcttcaataaagcttggtctgtttcctctcttacagtttgcatataacgtaaactgtgaaaccaagagaagacctccgtccacatcggcaagcgaaaggtttgtctttccctgttcatcttcaaaaatgcgaagtccaatcatttttcgtatcattttgtctgcaatctcttttgtgtctgtatctgctactccaatcaaaacaagatacccttttccaatctttccggatatatcaccatcaatcgtaacagatgcctctgttactctttgtattacaaatctcatcttctcaaacctctgtttttttattatttgttgtcagacaaatcaacgtcacagcactcactgtcatcggaatactgatcaggataatcattcccattactattgccggaaggaatctgctctcaagatctacgatcagcgttcccatcagattatagaacatgtgcatcagcatggatgccgccagggtgttatagcgatgcgccacaaatccaagtgcaaaccccaaaagtgccgcataaattccctgtacgagattttgatggaacactccaaacaaaaccgcctgtacaacattcgccaggatccaatgcattccggcacgttcaagatatttctggatcaaaccccggaaaatcatttcttccacaagaggtggaagaatcaatgtactgaaaacccacatcagcgaatattctgtcaggccggaattttctatcaaattctgataattatccatcgcatccggaagtgaccgtgctacaattgccagtataatactggtcacgtgtatcatgccaaaagtaaacagcgcgattaaaacgcatccgtccaatccgactcttctgcatttgcctgggattgcatggattcctccttcacgcagctgaaaagcaagataataccataaagcaggaataggcagaaccataaggtacaaaattgccgataccaaattcaaatgactcatcaggaactcataaaccaccattgttccattgtttcgcataaccaaaggcccgccaattgcggccagataagaaatgatgtatccgaatttgttaaagcagatcatgatcaccagaaagactgcaagtgccaaaaggtaattgtattttttcttcatccgtatttctcctttacggcagaatcttttgtgcttttgtcttgatcctctgaagtgcattgtccactgacttcggactctttccaagtaattccgcaatcgtccgataatccgttcccatcaagtgcagataaagaacatgattttctaatggactgagcaattctttgagctgctccacaaaagcttctgtatattcttttccaaaataaagaacttccggatcattctccttcgatgattctatcgtgtcaatcaaaggaagacttctcccctctcctacctgttcactgtcttcatataacgaaacataagaattcaaaggcagatgcttttttcgatttgatgcctcaattgccgagtacatctgtctggagacacaaagttctgcaaaacttgaaaatgatgttttctgcgttacatcaaaatcccgcactgctttgatcagaccgatcattccttcctggatcagatcctcgttctctccacccaacagatacattgcacgcgctttcttccttaccatggatttatatttcaccatcaggtaatccataatctcctgatttccatttttgtaatcacataaaagctgctcatctgtcattctgtcatacttattcatccgattatcacctgttatcactctttttttcgagcaatactcatatttatttctgcgaaatcctctgtcttacgatctcataagcaagaacgcctgctgccacagatgcattcagagaattaatctgacctttcattggaattcctgcaacgaaatcacagttttctttcacaaggcggccaacgccctcaccttcatttccgatcacaagaccgatcggtcctgtcaggttcaggtcatacatctgctcgccatccatatcagcacatacaaaccagagtcctttttccttgagttcttccattgtcttcacaagattcgtcacctttgcgaccggtgtataattcaaagctccggcagatgtcttcgcaactgtcgctgtcagaccaactgctcttctctttggaataatgactccgtgtgcacctgcaaggttcgctgtacgaatgatcgcgccaagattgtgcggatcttcaatattgtctaaaagaatcagaaacggagcttcgcctctctcttctgccagcttaagcatatcgtcaatcgtagaatattcatatgctgccgcatgcgcgatcacgccctgatgcttccctgtctctgagagctgggaaagtctttcttttgtcacaaaattgatcagagatccgtgttttttcgcttcacgtacaattgttcttaccggtccgtcctggcatccgtcaagaacataaatcttgtcaatcgtacgtccggaacgaaatgcttccagtacggcatttcttccttcaattacaaatgtctctgttccctgttctctattttcctgcatgttctgctcctttttcctttatctctttttcaatgctttcaagtccgatacttacaagctctgtcagtcgttcatactgacctgtcagatataaatgtccgatcaatgcctcaaaacctgtcgctcttctgtaatctgtaattgactgattctttgccggagacacagatcgtgcatttcttcctctccggtaaactccatgttcttcctcattcagatgctcctgcatggaacgcatcataaaggactgtgctgatgcctgcacatactggcttgtctcttcatgaagacggtggaccggcctgtttccacggccgaccaccatcgtcttaatgatcagatcataaacacagtctcccacataagcaagaaccagtggggaacactgctttgcatcaatctctttcataccgggaattgtccggatatactcttctaaacctgctgttatgctcttttccattgtactccttctcttgtatctttcagaacgatacctttcgcaagaagctcatctctgatctcatctgctcttgcaaagtttttctcttttcttgctgcctgacgctcagcgatcaatgcttcaatgtcagaatcaagaatctcatcttctttatcaacaataattccaagtacttctgtcagtcttaccagacggtcaaacagattctcaagatactctttggaactgtcttcgtctgtcatcgtattaatgaattttacaagatcaaatactgcagcgatcgcatctgctgtattgaagtcatcatccatagcgctctcaaagtttccaacatattctgctgactttgcaaacttctctgcttctgtctctgccatatcttctgtcttcgcgcttcccataaggaatttcagacgatcagctgctgtaatgattctctcaagtccgctctttgctgcttccatcaattcagcgctgaagttcagtggacttctgtaatgtgcgcttaacatgaagaaacgaagtacctgaaggtcatacttctcactgatctcgcgaactgtgaagaaatttccaagagacttggacatcttacggttatcaatgttcaggaacccgttatgcatccagtatctggagaactcttttccgttcgctgcttcactctgcgcaatttcattttcatgatgtggaaagatcaggtcttccccacctgcatgaatatcgatctgctcaccaagatatttcttggacatctctgagcactcaatgtgccatcccggacgtccctcaccccatggagaaacccatgcaggctcaccttcttttttcggtttccagagaacaaaatccagagaatcttctttctcatcctcaccgcttacaagaagggcacgtccgcctgactgaagatcatcaaggttcttatgggataatttaccataatctttgaactttcttgtacggtaatatacagttccgttcttctcgtatgcgtagcctttctcaatcagtgtctcaatcatgctgatcataccgtcaatctcttctgttgcaagcggattctttgttgccggctcaatattcatgccgtccatatctttcttgcactctgcaatgtaacgctgtgagatttcttctgctgtaacgccttcttcgtttgctttcttgatgatcttgtcatcgacatccgtaaagttagatacataattcacatcataattcttgtattcaaaatatctgcggacagtatcaaacacgatcattggtcttgcatttccaatatggatgtaattatatacagtcggaccgcatacatacatctttacttttccttcctctagaggaacaaactcttcttttctttttgacattgtattataaatcttcatcgttcttactctccttattttctttctccacacatcgcatatattttatcatagattccaaacgtttgtgaagttttatattctcttcctgcagttctctgatatctgtaagtaccgggtccggtaaatgtacctgatccatatcacttcttgggactttcttgttgtccatgcggacgattcgtcccggcacaccgacaactgtacagttcggtggaacttcttcaagtactacagaaccagctccgatcttagaattttctccgattgtaaaagaacccaggatctttgcgccggcgctcaccataacattatctttcaacgttggatgacgttttccctgttcttttcctgtaccgccaagcgtaaccccctgatacagtgttacattatctccgatgatcgtagtttctccgatgatcacacctgttccatgatcgataaaaagtccctttccaattgttgcacccggatggatctcaatccctgtcttacgcgctgctctctgagaaatccagcgtgcccagaaataatgctttttcaggtaaagcttatgcgccactctgtagcttaagattactttaaaacttgggtacaaaaatacttccatgtttgatttgatcgcaggatctcgctctcggatcacctctatctcctgtttgacataagatatcattcccatatttatcattcctttctgattcaagaatgcacttaacaccctaaacggattgttttgtatatcagaaaaattctctcctgatatggaacaaagaatgtgccttggcacattcttgcgcctgcggcggtcgcttgcgacacctaccttgtacgccgcagtgcgcatcctgagcggagcgttttttatatattaggaaagggactttcctaatatacaaaaaacttcgtctcaatctagagacgaagttctatccgcggttccactctaataaaagaagtataacttctttcactttcacgcacgtaacgtgtgcctgacgtaccctgctactccattcacaggatcgactcccgggggcacttcacagtttcttctctcaaaggtgctttcagccggtgacaccttctctctatgagtccaaatctctgttactcttcccgttctttgtctttctcaattctattaccaatatttattgttttcaacatctctattatcttatgcaaaaaatcattttttgtcaactattatctctgccgatcaactgcattttaacattttattcagacaatctcattcaaaaatattggacagaagttctgaagtttcctcagttcttcctctagttcttctgtaagaattacgcttttctctgcacgtatttcttcaggagttttgtatccaaacaatatttccgtcaatgctgcaatggaaagtactccctgtgaatcttccgtttcagacacgctcaggctttcttctccttttgagctactgagtttccagatcctgctgttcttatgaagaatcggatcgatcaccgcaaaagagcaatggatctcacattctgacgggattttcattttagaaaatagttcctgtaaatgaacgatcctgatcataataagcggtttttctttatatgcaaacgtttcatcatctggccagtcaggtgcttccttaagcccataaaccgaaaccttttcttcctgttctctaagaccatccaccgacgcccagaagagatcttctttcccttccagataaagtggttccctgatctcgagtccctcttctttcgcatatgcatagatacaaaccagcttctcttcttcaaagacaagccgcatcccgccaaactcgctctgttgttcgagaatctgtgtctgataatattgtgcatttcttaaagcaacaacattccagcaatccgaaaaattctcttcaacaaatgccgccatcttccctgcatccataaatcttgcatcacggtctacaatccgctcttgtgatatatttctatattcatcatttttatattcttttcttgcagaaaaaaatgcttcatcaagctcgatttgtttctgttcataaacaaatcggaaatcataaggataatagattgcttctgccgccggcatcaggaaggtaaatggcatcttctgcgaatactgatcctgtaatgcatgaatcagaagatttctcatatatcctctgcctctatattctgcctgcgtggcaactcccacaatataatccgatggaacgacactttcctgtaactttacctgataagggttcagctgcagcatcgcacgtatctcatcgtcttcctctattacataaatcgtattgtcttttgtcttgatataatagtaataatcaacaaattcctgactgtcttctgaaaatacctgttcccacaagctcctggttttcccatgctctgattggtccagctttcgaatcttcatcttattttcccgcacagcatccaccacatcctgcaggcttctccatcacatccacgctactgtaatttgtaaatttttcaatcgcacagatcgcctgggatgagattccttcgccgcttccggtaaagccaaggccctcttctgttgtagcctttacattgatctgatcaacgtcaattttaagcgctttcgccatgttttcccgcatctggtcaatatgcggacgcatctttggacgctgcgcaatgatcgtcgcatcaatattctcgatcacatatccattctcttccaaaagtctgcctacgtgctcgagcagttttatactggatgcacccttatatttcggatctgtatccggaaaatgaaggccaatgtctccaagtgctgctgctccaagcagtgcatccattacggcatgcagcataacgtctgcatctgaatgtcctaagagacctttctcgtaaggaatctcaactccacccaggatcagttttcttccttcaactaacttatgaacatcatatcccatacctacacgcataattatttctcctcaaaatcattttcagcatcttctgaaacaggttcttcattcagttctgcaaaaatatctaccactcttgtgtctgtcagttcttcttcctgagctggagtttcttcaactggtgttccttcagcttttatttcttcgtccggtgtttcctctgattctgttgtaatcaccgttttttcttctgatactgttttttcctcggaatccgccttagacactgcgtcttccagcttcttcctgtcttcttctgaaagcattgtcggcattgtattgtctgatactttttcgtcttctgatgcttctgtcgttgtgctctctgttacctgtgacatttccttcgccgctgccgcttcttctgcttttcgtttctgctccgcttttctctttgctatcatcttcgcaatctgctttttgatatcaatttcaaacgttttgcagatggcattccctgcataagcaactccaaccaggataaatacaactgccagtactgacataagtgtcatattgctaggacgctgctggatcatctcacttaagattctgatacccaggtaggtaagataacctccaagtactattctgagcgcacatccgcttttcttattcatcttgtttcctccgtatttctgttattggccacgttttaaaatataaacgaaagacaacaacttttttctatatcattctctgttatattaccacaagttgctccttaatactattatttctttgcttgatataagcagtaaccagtaaatttgcgtaaaaaaactgcgtactaatttcttaagcacgcagtcttcgttatagtagcgggaactggatttgaaccaacgacaccacgggtatgaaccgtgtgctctagccaactgagctatcccgccatatttaattagtatatgggacctacagggctcgaacctgtgaccctctgcttgtaaggcagatgctctcccagctgagctaagatcccatataagtagcgggaactggatttgaaccagcgacaccacgggtatgaaccgtgtgctctagccaactgagctatcccgccatatttagttagtatatgggacctacagggctcgaacctgtgaccctctgcttgtaaggcagatgctctcccagctgagctaagatcccatataagtagcgggaactggatttgaaccagcgacaccacgggtatgaaccgtgtgctctagccaactgagctatcccgccatatttaattagatatgggacctacagggctcgaacctgtgaccctctgcttgtaaggcagatgctctcccagctgagctaagatcccatattcatatgtcggctgcggtttccacttacgctttgtcgcaaccgacttgattattatatacttaacacctatcagatgtcaacaacttttttattttattttatattttattgtaactgttcagagccaacctccaaaatgctacgcatttcgtcggtgtacagttaccattttatttaaagtattttacacctgattcaaaaatcttcagatcctgctctccataaatgttaatagcaacatgatctccgcgtctctcagagtgagccatcttaccaaggacacgtccatccgggcttgtgataccttcgattgcacggtaagatccgttcacgttccactcttcgttcatgctgatatttccttccggatcacaatactgtgttgccacctgtccgttagcgaacagcttatcaagccactcttcgcttgcaacaaatcttccttcaccatgagatgccgggtttgtataaactccgccaagctgtgctccctgaagccatggggatttgtttgtaacaacctttgtataaaccatcttagagatatgacgtccgattgtattgtatgtcagtgtcggagcatcatctgtctgtccaacgatttttccatatggtacaagtccgagcttgatcagagcctggaatccgttacagataccaagtgcaagtccgtctctctcattcagaagtttttcaacagcttctttgatcttcgcattctggaatgcagttgcaaagaatttagctgaaccatccggctcatcaccggcactgaatccacctgggaacatgatcatctgagcctgtccgattgctttctcaaactcgtctactgatccacggatgtcttctgcatcaaggttacggaatacttttgtaataaccttagcgcctgctctctcaaatgcacgggcactgtcatactcacagttcgttccagggaataccggaataaatactgttggctgtccgatcttatggctgcaaatatgaatatcggatgtattaaagagcttctcttcaaccttggcatcagaatctgctgctgattttgtagcaaatactttctcaagtgttcctgtccatgcatcctgtgcgtctgcaagtgcgatcttcacatcaccgtaagcaagtacaggctcttctgttacttcaccgatttctgtataagtaattgcgagttctccaacctttccgtcttcaacctctgcgataatatctccaaatgcaggagcaaacagatctctcttatctacattgtgctcgattttggcacccatacggttaccaaatgccatcttgctgactgctgctgcaactccatgacgatccagtgcatatgcagatacaatttttccgctctggatatcttccatgaatttaccgtactgatccattacagcatcgtaaaccggaagatcattctcgtctctttcgatcttgagccatacaagtttgtttcctgctttcttaagttcaggtgtaataatatcctgctcaagagccatatcaacagcaaaggatacaagtgtcggaggtacgtcaatatcctggaatgttcctgacatactgtcttttcctccgatagacggaagtccgaaaccaatctgtgctgcataagcaccaagaagtgctgcaaatggctggctccatctctttggatcctctgtcattctacggaaatactcctggaatgtgaagcggatctttctataatctccacctgctgccacaatcttggcaattgactctgtcactgcataaacagctccgtggtatgggctccagcttgacagatatggatcaaatccataactcatcatagaaacactgtctgttgttccgttcagaacaggtactttcgctaccattgcctgtgtctctgtcatctggtattttccaccatgtggcataaatacggaacctgctccgatagaaccgtcgaacatctcaacaagtcctttctgagagcatacattgagatcagaaagcatagaaagccatgtctcttttacatctcctacttctttctttacaaaaaggctgtccttcttagaaggaatctcaacctcaacatttgtttcctggtgagcaccatttgtatcaaggaatgcacgggaaagattgacgatctcttttcctctccatacaagaacgagtcttggctcctctgttactactgctgcaactgttgcctctaagttttcttccttcgcgtatcccatgaattcatctacatctttcgggtctacaacaactgccattctttcctgagactcagagattgcgatttctgttccgtcaagtcctgcatatttcttcggtactttatcaagttcaacgcgaagtccgtctgcaagttctccaattgctacagatacaccgcctgcaccaaagtcattacatttcttgatcagatgacttacttcttctctgcggaataatctctggatcttacgctctgtcggtgcatttcctttctgaacttctgctccacaagtctcgatagactcttctgtatgaaccttagatgaacctgttgctccaccacagccgtcacggcctgtacgtccaccgagaaggatgatgatatctccaggatcagagttctcacggataacagcacgtcttggagcagctccaagtacagcaccgatctccatacgttttgcaacataatccggatgataaatctcttttacaagtcctgtagccagaccgatctggttaccatatgagctatatccatgagccgcctcacgaacaagtttcttctgaggaagttttcctttcagagttgcatctgctgatactgtcggatcagcggcacctgtcacacgcattgcctggtatacataagtacgtcctgacagtgggtcacggattgctcctccaagacatgttgcagctccaccaaatggttcgatttctgtcggatggttatgtgtctcattcttgaagttaatcagccactcttcttctactccgtcaaccttgatcggaactacgatactacatgcattgatctcatcagactcttcctgatcagcaagctttccttcctttttcaggcggcgcatagccatcagtgcaaggtccataaggcagacaaatttatcttctcttcctttgaaaatctcgctgtgatctttcaaatattctttatatgttgcttcgattgtctctttgtagtcaccttcatcaaacttcacatcttttaattctgtagagaatgttgtatgacggcagtgatctgaccagtatgtatcaagaacacggatctctgtcatcgtcggatctctgtgctcttctcctgcataatagttctggatatgcaggaaatctttaaatgtcattgccaatccaagagaatcatataactctttcaattctgcttccggcatatctttaaaaccgtcaaaaatctttacatctgccggctcatcaaatactgtcaccagtgtctccggtttctctgctgcagcttctctggaatctaccgggttgatgcagtgattcttaattgcctgcagttcttcgtctgaaactccgccttcaattacatatgtaactgctgtacggattacaggagcctcatcttctttaataaaacggatacactgctctgcggaatccgctctctggtcgaactgtcccggaaggaactctacggaaaaacatttatctgtttcatttttcgggaattcttctttataaaggaaatctaccggcggctctgcgaacacaccattgcatgccttttcaaatgtttcttctgaaatattctctgcgtcgtaacgaatcagaactcgtacatttgtcacatcctgaagtccaagataatgacggatctcatgtctgaggcccttcgccgcaacagcaaactccggtttcttttctacatatacgcgctttacattactcatatataatctcctctttctgtattacgtgttcaaaacacgatactaccttcattacattatctgtttttatcctaccatagttttcttcattagtataattaataaaattaaacaatctgataagcaccgctaattgattgtcgttttctcgtatctttctcggagtcagcaatatttactctgctttttcatattttgtgcaacggatttttttattctgttgtattttccctttatttatcttataataagatgaatatttattaggaggtctaataaaatgatggatataaactacgaattatacaaagtattttatcacgtcgccaccacattgaatttctcagaggcatccaagcagctgtttatttcacagtctgctgtcagccagtcgatcaaaacactcgaacgaaaactggatcagacgctttttatccgaagcacaaagaaagtccagctcacaccggaaggagagattctcctgcgccacattgaaccggccatgaatctgatccagaaaggtgaggctcagcttttagatgccgcttctaccggtgggcagatccgcatcggtgcaagtgacacgatctgcagatatttccttgttccataccttgagaaattccataagactttcccgaatgtacatattaaagttatcaaccagacttctttaagatgtacagagcttttaaagaacggactggtggatttgattgttgtcaattatccgaacgcagcgctcaacaatatttccgcctctatgaagatcaagaatttccatgatgttttcattgccggaaacaattatcctgaattaagggaaaagaaacttacacttgccgatctgctccactatccgatcctgatgctggataagaacagtacgacaaacgagtttcttcatcgcctgttccagcagcatcagcttgacctggttcctgagatcgaacttacaagcaatgatcttctgatcgatcttgcaagaattgggcttggaatcgcattcattccggattattgtctttctgagaacaatgatggtatcttcaaactggatatggaagaagagatgccggagcgttctcttgtgattgcttacaacgagcagcttcctctggctaagcctgcacaggaatttttgaactattttaaagaacagtaaaattttgtactgttcggagccaagcagaattttaaaaccagccttaaaatgcaagcattttatacctgttttatgaaatttcatctggctctgaacagttgcaaatattcttgaatcacttcttctttatccaataacgattctcatttttcatttatcgtttctcccagaattcttccatcttttcttttatctctttccgcccacacacttcgtattccttccactccctcggaaatagctgctgatactgccgattctgaaaacggtcatcaagcagaagaataattcctttgtcatcttcggtgcggatcactcttcctgcagactgaagtactttattcattccgggataaaggtacgcataatcaaatcctcgcatccctctctggtcaaaataatttttcacgatttctctgtcattgcacacctgtggaattcctgttccgacaacgatcactccgatcaatctgtcatgtgtaagatcgattccttctgaaaatacaccacccatcacacaaaatccaagcatcggatgatctctttcttcttcaaacatttccaagaattcttctctctgattttctgacataaattgcgattgaattaccagttctactccggatgccagtttttcaaactcttccaaaacatcctccataaactgataggaaggaaaaaatgcaatgtagtttccattcttcccatccactgtgtttctcagataatcggcaattttgcgatacatttctgtgcctctttgtgtatattttgtgcttgcttcacttccgatcagaattttcctgttctcctgtgggaacttagattcagcatagactgcataatcatccttctcaacagatagtaattgtttatagtaatcgattggaagcaatgttgccgagaaaaatattgtagaattcccaagttttaaataatgattcagattctccgccggatttacacagaacaactttattttgaatcttccgtttccttccagttctgtatactgtatataattttcatccaacaattcatgaatttccaaaaactgccttacctggaaaaagagttccataaatgcatccggctgctctgcatttcctgcattccgctcttcttcaagatatctttccatttgagtcagaagattcatcagttttactgcaaatggagaaacactttccaccaaccgataattctcgcactcgcgtttcatctcaagcatcagtttattgacagattccagactcttcacaagttttttatctcggtccttcatcagttttttcacctcgagaatgtcttctttatagatggaagcactgtacatttcccgtccacgttccacaaggttgtgtgcttcatcgatcagaaacaaataatctccgctgacattgtctgcaaaaaatcgtttcaaatgtgccgtcggatcgaacacataattataatcacagatcaccccatccgcccattctgacagatcaagagatagttcaaacggacatacatgaaaatcttctgcctgtctttcaattgattcccgtgtcagcttcttttgcttttctaacatgtcataaactgcatcattcacccggtcaaaatgacctttcgcataaggacaagcatccggattgcattctgtctcctcgcaaaagcagatcttctctttcgcagtcaatgtaattgaacgaaaggcaagacccttttcttcaagaatagaaaatgcctgctccgccacggttcttgtgatcgtctttgctgtcagatagaataatttatcccctaatccttctccgattgctttcaccgccggatacaatactgccatcgtctttccggttcctgttgaggcctggataaataatttctttttgtgataaattgtacgatatacggaagctgccaggtcaaactgcccttctctatatgcgaatggaaattcggtctgatgaatcgaagcatctcttctcttttcccactcaatctgcagttttgcccaacgttcatactgatgaaccagatcaagaaaccatttttctaattcttcaaatgtatactcttctcgaaatcttttcacatcttcagtatcaagattacaataggtcatctgaacactgatctgctttaatccctgctgtctggcataaatatatgcgtaacattttgcctgagcaagatgaaccgacacaggacgctccactcgatcaagggaacgcacgacgcctttgatctcatctattattgttttttctgattcaaggagaattccatccgcacgtccttccagttttaattggaatccgtcacacggaagctgcagttttaaggaaacttctgcctgatagtttgagcccatcatacgctggatctttcggtgaaggcgtcctcccatcagcatcgcatctttatccagcgtacctgaaatcctgttatcaatgtcaccttcttttaatatgaattcaaccagattccgaaccgataacctgatgattttctctgtttccatttcatttgcactccaaaatattatcgttgtaaaacacattgtgccaatcttttaacagattggcacgctgaaatacatcttttattttactttacttctttttcttttgcaacgcttgtttctgtacgggcaacttctgcgattgttttcgtaagtcctgcaattccctgaatctctgaaggaatgatgatcttcgtcgcttttccgtctgccgccttggcaaatgcctccagactctttaatgtaagaacaacatcatctgctccggcattcttaatatactcgataccttctgctgtagccttctgtacagaacggatcgcttctgcctgtccctctgcttctttgatccgtttctgtttttcagcttctgctttcaggattgctgcctgcttagatgcctctgcctccaggatcacagattccttttctccttctgcaacaagaatcgtagacttcttctctccttctgcacgcaggattgcttcacggcgttcacgctctgctttcatctgcttctccattgcatcctggattgccttcggtggcatgatattcttcagttcaacacgattcaccttgattccccactcatctgttgcaatatcaaggatcgtacgcatcttggagttgatcgtctcacgggaagtcagtgtctcatctaattccagatctccgatgatattacggagtgttgttgctgtcagattctcgattgctgcaatcggactttctactccgtatgcatacttcttcgggtcagtaatctgatagaatacaaccgtatcgatctgcatggtaacattatccttcgtgatcactgcctgtggttcaaaatcaacaacctgttctttcaaggaaactctttttgccacacggtcaaggatcggcaccttaaaatgtaatccaacgccccatgtctccttgtatccgccaagtcgctctacaacatacgcatgcgcctgcggaacaatacggatattcgacacaagaagccacaccacgatcataataatgatcatccaaataataagtccaaatatcatagctcatcctccttacatttctctaaaatcagttttactccggaaattgctgttactttggcaagcgaatctttctcaattctgtccttgtctgacttgcaccttgcagtccattcctttccctgcgcaattgcagtaccggtctgtgcaaaattatcaaccgtctctgttaccttaacaacacttccgatcaattcatcacaattcgtcttcacatgatgtacattgatatactttgctgcaaaaggcctggtaaagatcacaagcactgctgaaacgactacgaatacagcaatctgtatcaccattcccgctccggcaagcgaaactaataacgccgccagcgcaccgcccgaaaaccagattgaagtcagaccaaccgtggcaagctcaataatcaaaaacaccaccataagccccagccacaaaaaaatctccctctccaaaaaatccgccccctttctcatgcttacaagagcaattatgttaccctaatcatactcatatttctatataaatacaacataaattttatattaattaactagaaaaagccgaaacagaaaccacacacggtgcctgtttcggctttttcgttacatactttcaaagggatgaggtagagcgggccggtgctcgtggtaatagcaggactggtcttgcgaccattctataaagtgctcattccccatacgaatcccctcaaaaatacaaattactcacactcgcgaatcttctttctcagcggcagtaccatcgccggagatacagacagctcgtccagtcccatcttcaggaactcttctgtcagttcaaggtccgctccaagttctccacagattccgatccattttccttctgcgtgtgcattatctgctgccatcttgatcatggcaagcactgccggatgatgtggatcatagaacgcatcaagcgcaaggttctgacggtcaattgccagtgtatactgtgtcaggtcatttgttccaacactgaagaaatcaacttctttcgcaagttcgcggctcatcataactgatgccggtgtctcgatcataataccaagttctacgtcttccttaaatggaagtccttcttctctcaactctgccttcacttcttcgatgatctctttgatcttacgaacttcttttacagaaatgatcattgggaacatgatggaaagatttccatatacggatgcacggtaaagtgcacgaagctgagtcttgaagatctctggtcttgtcaggcagatacggattgctctgtatccaagtgccgggttctcttcttttgcaagattgaaataatcaacctgcttgtctgctccgatatcaagtgtacgaatgatgactttctttcctgccatgctttctacaacctgtctgtaagctgcaaactgctgttcttctgtcggataagtactgttctcaagataaaggaactcacttctgaacagacctactccgcctgcatcattcttaagtactgcaccaagatcagatacgttaccaatgttcgcatagacattgatcttctgtccgctctttgtcacattctcttttcctttaagctgattcagaagttctttctgctcaaggtctttcgcacgcttctcctgcatctttgcaagtgtctcttcatccggatccacatagagtgttcctgtaaatccatcaatgatagccatctctccgtcatatttcggattaagagcttctcccattccgattacagccggaatattcattgttcttgcaaggatcgctgtatgagagttagaagaaccatacattgtggcaaatccaagtaccttctctttatcaagctgtactgtctcacttggtgcgagatcatccgcagcaacaatacaaggttctgtcatctcacgtgttccgttgctcactccgcagagaatatcaagtacacgctcggaaacgtccttcacgtctgctgcacgtccctgcatatatgcatcatccatagatgcaaacatctgtgcaaagttatcagctgttgttgaaacagcatactctgcatttacactttgtgtacggataattccttcaatagattccagataatccagatcatcaagcatcatctggtgaatctcaaagatcatggcgttggcctcacctacatcttcaatggctttgtcgtagagaactttcagctggtcgattgctgtattcttagcctcttcgaatctcttccattctgcatccacatcatctacatgtgttcttctgatcaccttttcgtttctcttatagaacatcagctttccaatggatactccaccaaatacgctttttccttcaatcgttatcatatacacaaatcctccttgaaataaaatatttcatagacattggttaaattatataatacttcaattcttttttcaatcgacatcctttatttttccaatccattcgtaaaataatctttcctcgcacttctatttttcaccaatcttataaatccgatatgctaaatggtatttacaaattgttgaaatcgattttacgtcacttcacatgtttttgtcatttttctacaaatcaaaaaagattacatttgactttctttgttaaacatgctacaatagacaaagtgtcaatatgaatttatactgacacaatattacagttttcagcgcattgtaaactgtgatgatttaacaacttatattcttttaatggagggcaacacaatgacaggtacagtaaaatggtttaataaccagaagggttacggatttatctctgacgctgaaggcaatgacatttttgttcattattcaggacttgtaatggatggattcaaatctctcgaagagggccaggctgttgagttcgaagtaacagaaggcgctaaaggacctcaggctgttaacgtagtgaaactttaatcaagactttatgtaccttttaattaataaatagaccgtatttaatttttaaaagtaatacagaaattcgattaacaaaaaagagcttttttaagctctttttttgttgcacaccccggcaatctacattacgcttacacgcgaaatgcagttttgccggatataattattttattaacaaagtggatattttgcagtcagctcagcaaccattgcttttgctttctctacattctcttcactttcgattaccattgcaataatctctgcgatcttatccatatcatcttccttcattccacgtgttgtaaccgccggtgttccaagtcttacaccacttgttacaaacggtgaacgaggatcattcggaattgtattcttgttcgctgttacatgagcatcatcaagacgcttctccagctcttttccgcttgtctctgttcccgacaggtctacaagcatcagatggttatctgtatctcccgaaacaatcttaactccgcgtgcttttaaaccgttacagagtgctttcgcatttttaacaacctgctccatatatgttttatactcaggctcaagtgcttccttgaagcaaaccgccttaccggcgatcacatgcatcagtggacctccctgaattcccgggaatacagctttgttgaaattgaatttcttattcatctcttcgctgcacatgatcattccacctcttggtccacggagtgtcttatgtgttgttgttgttgtcacatgagcatacggaatcggacttggatgaagtcctgtagcaacaagtcctgcgatgtgtgcgatatctaccatcagatatgctcccacctcatctgcgatctcacggaaacgcttgaaatcaattgttcttgcataagcacttgctcctgcaacgatcagtttcggtttatgttccttcgcaatacgaagcacttcatcataatcaatcacgccgtctgcattcactccgtaatgtgctacatcaaaatatttaccggacatattaaccggtgaaccgtgtgtcagatgtccgccatgatcaaggttcatccccatgatcttatctcccggctcaagcatggcaaacataactgccatgttcgcctgtgctcctgaatgtggctgcacattaacatactcacatccaaacagtttctttgctctttctcttgcaaggtcttctactacatctacacactgacatccgccataatatctctttcccggatatccttctgcatacttattagtcagagggcttcccatagctgccatgactgctttgctcacccagttctcagaggcgatcagctcgatatgggagttctgtctctccatctctgcttttattgcatctgctatctctgggtctgtgttcataatctcatcgaaatcgtacattatctcttcctccattaaagctttaccacgtcaaagcgttgtagtcattatagcacagcactttacatccgtctagcgcatttcctacgaaaaatcaaacaaggaaagctgattactctgtggaagattcccaaataatcccagttctgccatcagatcgatcactgtcttacttacttttgtcctctgacggaaatcatccagtgagagatatggaccgtcttttgaagcttcttccacagcttccgccgccttatctcccattccttcgatgctggcaagagacggcatcagttttccgtcaatgatctgaaacatcttcgccttcgcccggtaaatatcaatcggcataaactccagtcctcgtgcgtacatttcctggacaatcttcatatctttcatgacatcctgttcttttttcgtcagggtatcacttcgttttttataatctttcatgtagtaattcagtttatccttgccctgacacatgatcgcataagaaaatgcatccgcacggattccaaaatatgctccataataagcaagcggataattgatcttacaataagcgatacgataagccatcataacataggctgccgcatgagcctttgggaacatgtagctgatcttcttacaggaccatatataccagtccggtacatcctgagctttcatcgcttcttcccactccggtttcaatccttttcctttacgcacactctccataattgtaaaggccagtgcactttccactcctttgttgatcagatagatcatgatatcgtcacgggtacagattgccgtagaaatggttgcttttccggattttacaagttcctgtgcatttccgagccacacgttcgttccatgtgacagaccggaaattcggatcaaatctgataacgtctgaggttttgtatcctgcaccatctgaataacgaaatccgtaccgaactccgggattccaagacatccaagcttacagccgtcgatgtcttccggtttgattccgagaatttctgtgccatggaatagttcgattactttcttgtcatccagcggaatatccgttgcaacgaaaggatgctcctcattatattcattttccattgcatcggaggtgatatagtcttccaatgtacgaatcatcgtaggatcatcatgtccgagaatatcaagtttcaaaaggttatggtcaatggaatggtaatcaaaatgtgtcgttgtaatgccacattccatatcgttggccggatgctgcaccggtgtaaactcattgatgctgtgtccgtgcggaagtactacgattcctcccggatgctgtccggtacttcgccggattccggtacatccttctgtaattcgttcaatctcacagccacgctttctctgaccacgttcttcataatagtttttcacaaatccatatgctgtcttatctgccagcgtaccgatcgttccggctttgaatgtatgaccctcaccaaagagaacctctgtatatttatgagccttcgcctggtaatctccggagaagttcaggtcaatatccggctctttatctcccttgaaaccaaggaatgtttcaaacggaatatcaaacccggccttgaccagtttttctccgcacacaggacaatttctatccggcatgtcataaccacagcctccggcaaatgcacgaacctcttcagactcaaaatcactgtaatgacatttttcacagtaatagtgagggcttagcggattaacctccgtgattccggacatcgttgcaacaaaagacgaacctactgatccacgggaaccaacaagatacccatccgcattggacttccataccagtttctgtgcaatgatatacataacggcatagccgttggaaataatagagttcagctctttctcaagtctggaagacacctgtaccggaagatcttctccatacatttcatgtgctttacgataacagatatctcgaagctcctgatcggaatccgcgattaccggaggacacttgtttgggtttaccggtgagattttctctaccatacgtgcgatcttctgtggattttctataacaacttctctcgccttcgcagaaccaagatatgcaaactcttccaacatttcatctgttgtgcgaaggaacagcggtgcctgattatctgcgtctttgaatccttttcctgccatgatgatccggcgataaacttcatcctccggatcaaggaaatgaacgtcacaggttgctacaaccggcttaccgaatttctctccaagttcaacaatctcccggtttacgttacgcagatcttcctctgtattgatattcggcgttttctcatcttcgagcataaacatatcatttccaattggctggatttcataataatcatagaaatctgccagtctcgcaatctgctgtgcagactgtttttcaagaaccgcacggtataattctcctgcctcacaggcacttccaatgatgattccttctctgtgttcattgatcagacttttcggaattctcggtcttcttgcataatatgtcatatgagatgccgtgatcagctgatacagattatatcttccaatatcattctgtgcgatcaaaataatatgatgtgtcggcatcttacggattgcattaacattacgatccccaaacttgttcatttcttttaagttcatgatgtgctgatctttgagcatttcaacaaattttacaaaaatttctgctgttgcccctgcatcatcaaccgcacgatgatgattttctaatgaaattccaagtgcttttgcaaccagattcaatttatatttcgaaagggtcggaagcagcacacgtgcaagagccactgtatcaacagctgtgaattcctgttccagaccaagcacacgacaattctgttcgataaacccaacatcaaatcctgcgttatgcgcaaccaatgcgccctcaccaataaattcgagaaactgtggcagcacaacctcgattgtcggagcatccagcaccatctcatctgtaatacttgtcaggtttgtgatttcgaaaggaatcgggcgttccggatttacaaaggtactgaacttgtctacaatctgcccattctcaaccttcacagctccaatctcaataattctgtcacggatagaactgaatcctgttgtctcgatatcaaaaacaatataggtatcatccaatgtctgatcttttgcattaactgcaatctcagttaagtcatcgaccacatagccttccacaccatatagaactttaaacggatcatctttatccaatgtctcaatatagtgatttgcaaccgggaacgcctgggctacaccatgatctgtaattgcaatcgccgggtgtccccagtcatgtgctctgcggacgatatctgtcacttcagaaactccatccatatcgctcatctttgtatggcaatgaagttctacacgtttcgttggattgagatcttgccttgagaccgtaaagtctccaatcttcttgattccggtaattgaaccgattgtcagttcaccatcgaatttatcaattgtcgtcacgcctttgattttaacgaaagcacctttcttcaaatctccgagaatctccggtaactgatcatttctagcaaacatcttgatcgtgattgtatccgtaaaatcagtcacagcaaagataatgattgtcttctcatttctgatctcccgtgtatcaaaattgataatcttaccatgaattgtgatctcacccatctcagaaacaacctgttccaatttgattggctcatcttcaaaattctttccgtagatcaggttcggatcgtctccgatcttcaccggacgcacataatccttcttgcggaattccttctttttgaactctttctttccgcccgaaacggatgcatttcctgaagaagattttcctgaagtctctgctttcttttctccggaagacgagcttcctgattcggatgacttcttctttgcctccacagcagactttcgctcctcatattcgcctctctgtttcgcgcgccgttcaaagattgcattaatttcctgctgaatcctctgctcgtcatattctctgcttccctgaccctcgttttctttatatgtaacccggatatcaacattcatatgaaaacgattcctgaatacatcgtccagcagattcatgatttcttcttttcttccttcggaaacaatcgtatcaagaagctccagacggacgacatttccctcttcatagttcacttctgcctgtgaaaacatgtttgcagcaaggacactgatttctttcagttcaagaatcaaactctccttgtactcttccatcaccgcttccggtgtataaagctcagacagctcatactcttccagaatctgaagttttacagaagatgttccaaagagctgctctttgatccgctgctccatctgccatattttcttctttgggatcagatgatgactctttaaatgtacatgcagaaaatcacgaccggaattagtcgtgattttcttaacttccacatcagcaaagaggactttaaattcctcttctactttcaatgtgggaaatacatgaaaaaatgttttttcattctttatttgttccaattcaataactcctgtcttaaagtatcaagaagttcttcttcctttaccttcttgatgatctcacccttcttgatcaaaagtccttccccgatacctcctgcaattccgatatcggcttcttttgcctctccaggtccgtttacaacacatcccataactgcaactttaatatcaagcggaatgtctgctaccatctcttctacctggtttgcaagcttgatcagatcaattcttgttcttccacaagtcggacaggatacaacttcaatacctcccttgcgaagtccaagtgtcttaagaatcagttttgctgtacggatctcttctaccggatctcctgtcagggaaacacgaattgtattaccgattccctcatggagaatgattccaagtcctacagaagatttcacatttcctgaatatacagttccagactctgtaattccaacatgaagcggatatgggcattccttagcgatcagctcatgcgccttcacacacatcagaacatcagaagatttaatgctgacaacaaggttgtcatagcccatagactcgatcagatgaactttatccagcgcactctccacgatcccttctgcagtaacaccaccatatttctcaagcagatgtttctcaagagaaccactgtttacgccgacacggattggaacattgtactctttcgctttgtctactactgcctgtacccgttcttttgcaccgatattccccggattgatacgaatcttatcagctccattctcaattgctgcgattgccatcttataatcaaaatgaatgtctgcaacaagcggaatatgaatctgttttttaatctctttgattgcttttgcagcctccattgtcggaactgtacagcggataatctcacatcctgctttttccagacgcaggatctgctccactgtggcttctacatcttctgtccttgtatttgtcatagactggattgctatcggatggtctcccccaatcacaacatccccaattcttacttctttcgtctgatttctgtacatgatctgtaccccctgtttccactgctctgcaagttctttctgtgtcatctgctgaggcagaatcaccgtttactttccacttttttcaaatgtcttctgacttccatattctgaatcagtcagtgtcagtacgttctgttccacgctgtattcgtaagttccttccatcacatccgcaatatcctgaagctcctgtttggaacagtcttttgtcttttcagcctgttttgctatcttttcttcgttcacatggattgcaaaacgcttatattccatgtcaattgtataatcaacaggaacgctgactgtactctcatccaaagtctgcacaatattcattgtcccgttattcttgatcgtcagcttcattccatcatctgtgttctcccagtttcctgtcagaggattggaagtaaaaagcttcacagcgaaaaaaacaacgatcagaataatcagaactgaagtaaccgtcataactgttctccaggctatatttctcttttcttcattatctttcagtaacataagaatcacttcctttgcatatttatcttatccaaaaataccgccaataattccataggaaatgactgacataataaatgctgcgaggcagacaccaacaacaactgccggaaaagcttttctaaagcggattccaagcagagctgcgatcagtgatcctgtccacgctcctgttccaggaagaggaattccaacaaaaagtacaagaccccagaattcatatttctctatcttgtcacttttactcattgccttcttctccagcttctccaccatcggcttcaaacgcttcgttcctttcatccagtcaaagatctttgtaatcagtaaaaggatgaatggaattggaacaagatttccaatcacacagataggtactgcttttgcaagttccacattcaaaaatgccggtcctgctgcaagcagtcctccacgcaattccagaatcggaaccattgagatcaggaagagaataaattccttaccgacctttccgcccagtgtcaccataaaccagttgattaaagcttcactcattcagttatttctcctttatatatgttctcaaaaaatcaaaaagcgtctccatctcttctcttgtaccgattgtaattctcagatactgatcgattcgtggtgcattccaatgtctgacaaagatattattctctttcaaagcctggaaaagttcattcgcatcaacctctggatgtcttgcaaaaataaaattcgcctttgcatccgggaaaacaaaaccaagtttcctgagctcttcttttgcccattctcttgtttcaactattttacgaactccttcttcaaaatatgctttgtcttcaaccgcttccacaccacaggcaagagctgtctgattcatcgtgtaagagttaaaagaatatttcacatcattcaggcagcggatcagatctggattcgagattgcatatccgattcgcataccagccatacttcttgcctttgagaaagtctgtgtcacaataagattatcatatttatcgatcagttccatcgcagatcttcccgcaaaatcaatatatgcctcatctacgatcacgatagaattcctgttctgctttaagatatcttctacaaattcaagatcttcataaattgctgtcggcgcatttggattcgggaaaataattccgccgttttcagcataataatcctctttcacaatcttaaagttttcatcaagttctggacagtgataaggaatccgatataattctgcccagactttataaaacgaatatgtaatatccgggaagagaattgggagatctgaattaaaaaatgtaaggaaacacatagaaatcacatcatcagatccaactcctacaaagacctggtcttttcctacaccataataatctgcgagacttccaacgagttcgtccgcagttggatccggatacaggcgaaaacggtctgtgtccatctctttcagaacacgttccactcccggtgccggaggatatggattctcatttgtattcagtttcacaaccttatgctgtggctgctcgcccggtacatatggttctacgctacgtatatttctcaaaagttcttctcttacagccatggtactacctctatctatactctctcgcaagctccgcaaattttggaagtgcatttacaattgtctcatatgctacacaatacgccattctgacatatccgggacatccaaaagagcttcccggaacgatcagaatattgtatttcttcgcggtattacaaaattctttttcatctgcaaccggtgattttacaaagagataaaatgctccttccggtttgatgcactcaaatccaagttctttcaatccattataaagagtctctctgtttctgtcataatatgaaatatctgtcttctcattcagacatgccttcaccactttctgctgcagtgtcggtgcattgacaaatccaagaattctcgttgcaacgttagctgcggcgttcagtttctcactgtctgccacttcatccggaattacaagataaccgatacgttctcccggaagagaaagtgatttactgaaagaatatcctacaactgtatttgcataatactttgtgagatatggaacttccactccgtcataagcaagttctctgtatggttcatctgagatcagataaatctctgttccaaattctttctgtttcttctcaagaatcgctgccagcttctggatcgtctcttcggaataaacaacacctgtcggattattcggcgtattaacgatgactgcctttgtctttggcgacagctttttctcaaactcatcaagctttggctggaatgtctctgtatccggagatatctccacgatcacaccgtcataattatccgtatagcttctgtattctccaaaataaggcgcaaacacaacaacttcatcacctggattcagcagtgatttcaaaatcacattaagacctcctgctgctccgactgtcatcgtgatattgcgggaagcaaagtttgttccaaagcgttcatttaaggaatcagcaactgcctgtctcacatcctcataacctgcattgctgttcgtataaccgtgaagcacgatcggatcctcttcggaaaggatctcgatcattgctttctttaccgcttccggtgccggaacattcggatttcccaaactgaagtcaaatacattctctgctccgtattttgctgcaagacggttgccctcttcaaacatcgcacggattgcagaactgttcgctaccatgttttccattttttttgaaatcattgctgtcctcctattcttgtcacaaaccctttctcttccaaaaaagccggacgataagataattttgccttacggagtccttcttccccggcatcatcttctctgttcacataagtgtaatccatacattcatgttcaacaaactgctgattaatcatagggtatgctccctgtacatctgcaaatgctttctcaatatgaacaacaaatgtatccttgcacagttcttcccctactgtaaaagcaacaattttttcgccatttctcaacactccgcctttaaagccgagttctttgtataaacggagggaattcaatgaaacgcacatctctgcgttcttctcaggatcatcattacatccattcgaatttctccacttcagagccatctgaaagcacgcttctacattctcatcactgagtgattcgtaagaccagtccggataaagctgcttaaacttattaatatggtttcgctttccgtgaagcttctttcctgcaagtgttacaagcttctccgtctcatagatgtaatctgcctgatctctgtcgtattcgatctggaactgtcccggataccactcttccatctgtgaaaaattctccggtgtcacacagtaaaggccaaattcacagccttcttcctcgcagatcttcatcaattcttccaatgcagctttgacagcttccggctttcctaccgggtaagcataagtatgtccgtctccttcatcacgaaatacaagtgcatcatgaaggattgcatatttcactttatactgtctggaccagagatatacattcgcaaatgttctctcacagcttctgcttggagcctgtgcaaaataatagtcaatcagttctttgtcttccagttccggtcgtttgaattccggtatcattcttgtactactcctccatctttgcaagcttcgctgtctgatccgctgcaatcaggctgtcgatcacttcatccagatcaccattcagaatgctatccagtttatgaagtgtcagcttgattctgtgatctgttactcttccctgtgggaagttatatgttctgatcttttcagaacggtctcctgtaccgatctggcttcttctctctgctgcctcagaagcctgtttcttctcaagctccaggtcatacagtttggaacgaagcagtcggaatgccttctctttattctgcagctgtgatttctctgtctggctgtagatcacgattccggtcgggtaatgagtcagtcgtacagcagagtccgttgtattgacacactgtccaccgtttcctgatgcacgcattacatcgatacggatatccttctcatcgattacaacatcaacttcttctgcctcaggcattacggctacagtaattgttgaagtatgaattcttccgccactttctgtctccggcacacgctgtacacgatgtactccactttcgtacttcatacgggaatatgctccctgtcctgtgatcatgaatacacactctttaaatccgccgattccattctcattcagagagatcatctctgtcttccatctacggctgtctgcataatgcacatacatacgataaatttctgccgcaaaaagtgcagcctcatctccacctgcaccggcacggatctcaacgataacgttcttatcatcattcggatccttcggaagaagaagaatcttaagttcctgctccaattcttcaattctggctttagattcattcaactcttcttttgcaagctcacgcatctcttcatctgattcttcttccaggatcatcagactctcttctacattctgcttacaattcttatattcctgataagcttcaacgattggtgcaagatcactctgctctttcatcagcttacggaaacgttccggatcattcgccacatccggctcctgaagttcacccattacttcctggtaacgaattaccaaatcctctaatctgtcaaacatagttctatatcctcttctattttttatcttctttatctttttaatagtacacgccacagacgatgcggtcaagtcctgccaggtccttttttacgaacaccttgtcatatcctgcttttttcataagatcagaaacttctttgccctggtcatatccaatctcgaaagcaagtattcctcctgttttcaggaattgttttgcatcagtaacaatcttccggtagaaatacaatccgtcttctttcccatccaatgcactgaatggatcgtgaagtttcacttcgtcttgaagcttctcaatttctgctgttctgatgtaaggtgggtttgataagatcatatcataggtttcactgacattttcaaaaagatcactcaaaatccagttcacttttcctttctcatcctttttcgtgcttctcaaatgtttttcatttttctgcgctaccataagagcctgctccgaaaagtcaacacctgttccttctataaatataccctcttgttctgcataatgcattacgctcagaagaatacatcctgacccggtacacatatccaacagttgcaaacaaccttttgatctgaatatctcttgtttcattatctccagtgcctcttccacaagcacttctgtatcttgtcttggaatcagcacatgttcattcaccagaaattcaagccccataaattcctgacttcctgtaatatgctgcaatggaatatgatttcttcttttttcaagatattctttatactttttccatgcttccggatccatgctctgatccggatccatataatagcgagctttcgtaatccctgtcacaaattccaacagataccacgcatccagatctgcctctgtaattcctgctttcgcaagaatttcttttccttctttatatgcatttttcaaacttattgaatcgctgcaatctgttttataccctgtcctcttgtctgattctgttctcattgcttcaggttctcctcctgccatgtcttccagtcaaacactgcttccactgctttgatcccaacctcgatcatactgtcatccggttcctttgttgtcagattctgaacccagagtcccggtttactaagtacattgattaccggatgatcactgtttcctgccacacgaatcaattcataagagattcctgcaatcaacggaagcagggcgatccgaagaagtactctcacaatctgggactttgccgtaataaaaaagcagacaataatgcttacgatcatgacaaagaaaagaaagctcgttccacatctcttatgttgtttggaactcttccgtacattttctacatttaattccaatccatgttcgatgcaattaatacatttatgctctgccccgtgatacataaatgttctcttaatatcctttgttctggaaatcagaacaatatagatcaggaaaatagcaacgcggatcacaccttctaaaacagtcattacaagatgtgaagaggtatgcttttctataatactactcagataatacggaagaaccataaaaataccaaccgcaatcaagacagaaaccacaactgtcagattcatgatcagtttttccttcttctcctgctttcttgcctcatcttctgtaagaatttcttcttcctcgtcttcaaaaaaacttgcagaataagtcaatgtcttcattcccagcacaagagaatccacaaaattaaaaatcccccgaatgaaaggaatcttttgcggtgccttccatgggagaactcctttgtattcctgaatatcaacttcaatctctccatctggtttccggacggcaacggaatatgtttcccgatttttcatcataatgccttccagcactgcctggccgcctatattcgatgatttcatatatttctcctaaacacaaagaggactgagatttccacctcagccctcatcacttcgtatttcttatttaataccgtatttcttattgaacttatcaacacggccacgagcctgtgttgctttctgctgacctgtgtagaatggatgacacttggagcagatttctacgtggatgttctcctttgtagatcctgtaacaaatgtgtttccacagttgcatgttacagttgcctgataataattaggatggataccttcgcgcatgattttcacctctctatttttaaattacttattattttctctaaacagctttctaattgtatcacacattttttaataatgcaatacctttttagataaatttctgacggatgatctgctgaacaagctcttcgtttgtttttgtacgagaaaacatattcaaaagattgtccactgcctcttctgatttcatgccgttcattgcttttctcataatataaactgcatcctgttcttcctttgtaagaagaagatcttctcttcttgttcctgattttggaatatcaattgccgggaacactcttttctcctgaagctttctgtcaagcatcagttccatgttacctgtccccttaaattcttcataaacaacatcatccatcttgcttcctgtatcaaccagtgctgttgcaagaatcgtaaggcttccaccttctctcatatttcttgctgctccgaagaaacgctttggactgtaaagtgctgccggatcaagaccaccggaaagtgttcttcctgatggtggaacgatcaggttatatgctcttgaaagtcttgtgatgctgtcaagaagaatcataacgtcttttccatgctctaccagacgttttgctcttgagataaccatttctgatactcgtttgtgatgctccggaagttcatcaaatgtagaatgaatcacctctacattcggaccttcaatggcctcacgaatatcagttacctcttccggacgttcatcgatcaacagaatcagaagatgcatattcggttctgtcttctgtacagataatgcaacttcttttaataatgtagtttttcctgctttcggtggagatacaatcatacctctctgtccctttccaataggggaaacaagatcaacaatacgcattgctgttgtacagcccggattctccagacggattctctgattcgggaaaatcggagtcaggtcttcaaagttctttctcttcattgcctctgccgggcgcagtccattgatcgtagacacataaagaagtgcactgaacttttctccctgcgtcttaactcttgtatttcctgtcaggatatcgcctgttttaagtccgaatctgcgaatctgggaaggagcaacatagacatctccatctcccggaagataattgtcagaacgaatgaatccatatccatcctgaagcacctcaaggattccgtttgctgtaaaaccactgtccagctgttcaatatctgtctcttcttttttttcttcttttacttcttctctcgcttcttctgctgcctctttctgctcttcctgctcatccagctcaagcattgcatcgatcagatcgcctttctttaatgtagaaacacctctcatctttcttgcttttgcaagttctttcaatgttgccagcggcaatgattcatatttttctcgtgtcatattcttttcctttcttttcaggtaaatttgttctgtcaatccacttcacatgtgcccttttcacatactggattattcattcatacttcgggaatacaagtctgattcgactttaatggaaatttgctttaaatatggtgttattatacagtatatttttctaaaaagaaagaactttttgaacttttctctgttttcctgtacttgcgtgtttcctttttcagtggtatcattaattcaatcaaatcagagaggtataaaatcatgacaaacaatgaaaaagctttaaaaatgcatgaagaatggaatggtaagatagagacaaccgccaaagcgcatgtcaactcaagagaagatcttgccatcgcttatactccgggtgttgctgaaccttgtaaggtgatcgcacaggatcccgaagccgcatataaatacactatgaaagccaatacagttgctgttgtatctgacggaagcgctgttcttggtcttggaaacatcggtgcacttgctgctatgccggttatggagggaaaagcggtcctgttcaaggaattcggtggtgtcaatgcagttccgatctgtctggatacacaggacacagaagagatcattaaatctgtagtcaacatcgcaccggctttcggcggaatcaacctggaagatatttcagctccacgctgttttgaaatcgaaacacgcctgaaagaacttctgaacattccggttttccatgatgaccagcacggaacagctatcgttgtcctcgccggaatcatcaatgccctgaaagtaactggaaagaaaaaggaagattgccgtgttgtagtgaatggagccggatctgccggagttgctatcacaaagctgcttctcacttatggtttccctcatattacaatgtgtgacatcaacggaatcatttccaagaactcaccgaacctgaactggatgcagcagcagatgactgaagttacaaatctggaagaacgcacaggaacacttgccgatgcattaaaaggtgctgacattttcgttggtgtttctgctccgaatattgtttctaaagagatggttgcttccatgaataaggatgcgattctgttcgccatggcaaaccctgtaccggagatcatgcctgaccttgcaaaagaagcaggtgccaaagttgtcggaacaggacgttctgacttcccgaaccaggtaaacaatgttgttgcattccctggtattttcaaaggtgcattagaaggacgtgccacacagattacagaagaaatgaaacttgccgctgccaatgcaatcgcaggtcttgttccggaagaagaattgaatgaaaacaacattcttccggaagcctttgatcctcgtgtagcagacacagtaagcaaagcaattaaggatttaatctaatatgtggggagagaagcgctaccactctcttgactatgcactgaaatcccagtttggagagaaagtatatcgcattgcattgaacggcggtatgacttgtccgaaccgtgatggtaagatcggatatggcggctgtattttctgcagtggtatgggttctggagattttgccggttctgcctgcaaaacgattacagaacagcttgcagaagggaaagccattcttgccagaaagcgtccggtgcatgcttatatcgcatatttccaggcctttacgagtacctatgcccccatagaatatttgcggaaagtttttacagaagcaattgaggaccccgatgtgaaagtacttgcaatcgcaacccgccctgactgtttagattctgatgttctggaacttttagatgaattgaatcagatcaagcccgtctgggttgaacttggtcttcaaaccattcacccagaatccgccagatacattcgcagaggctatcctttagaggtatttgatactgctgtgcatgaactgaaacgccggaatctgactgttatcgtacatgtcattttatttctgcccggagagactcacgaaatgatgcttgagacaatcgaatatttgaatcattcaaatattgacggaatcaagttgcagcttctccacattttgaaaggaactgatcttgcagttgaatatcagaaatgtctttcagatcctgcttataccggtcctgctttccatatcccggatgcggacgaatacatccgtctgctcactgaatgtatccagcatttgcgtccggaaatcgtcattcaccgactgaccggtgacggaccgaaggatctcttgatcgcacctctgtggacaggcgcaaaacgaactgttttaaatcagattcacaaatatatgaaagatcatgacttgtaccagggaaaggagtattatggctgaaacatttacattatataaactgatcgtgttgtacatgttggatagagtcgattttccgcttacaacttcccagatatcagaattcattctggataaagggtatacaacttattttcgtcttcagtctgcacttgcagaattaacggattccgggcttctgaaaattgagctgacacataatcgtacgctttataatctcacagaagaaggagctgctacgatcaactatttcagaaataaaatttctcctgagattcgtcaggaaattgataattttatcaatgagaaaaaatatgatctgaaagaagaggtttctgttaaatcagattactatctgaatacaaaccatgaatatgaagtaaaatgccagattttagaaaatggctcccacctcattgatatgacactcactgtgccaactcagactgaggcagaagccattgtaaataactggaatcgaaagaatcaggagatttacgctttactgctctcgcagcttctgtaaacgctccttgatctgtttctcataaccaaggtcgccgggttcatagaacctggcgtcttttatttcatccggaagatactgctgatccacataatgatctggataatcatgtgcgtacttatatcctattccgtgtcctaatttctgtgcacctttataatgtgcatcctgaaggtgtgtcggaaccgttgttttattgttccgtactgcatcattcgctgcaaatattgcattaacggcagaattactctttggcgcagatgccacataagtcaccgcctgtgaaagaatgatctgagattccggcattccgatccgctcaactgcctgtgcagccgcaaccgcaacagtaagtgccatcggatccgcatttccaacatcttcagatgcacagatcataattcttctcgctataaacttcacatcttctcctgcatacaacatctttgcaagataaaagaccgctgcatccgggtctgagccgcgcatgctcttaataaatgcagagataatatcgtaatggttatctccttttttgtcataattcaccactcgtttctggatacattctgacgcaacatccagagtaatatgaatttgtccatcttcgcttctgtccgttgtcagtacacccagttcaatcgcattcagtgcgtttcttgcatctccacctgacacatctgccaaaaattcaagtgcatcatcttctatcactgcatgaaagcttccaagacctttctcagtatcattcactgcacggagaagcagttccttaatatctgtcttctccaatggatgcaattcaaaaatacttgatctcgaaatcaaagctccatttacctcaaaataaggattctccgttgttgcgccaatcaggatcaacgttccatcttccacaaatggaagcagataatcctgctgccctttattaaagcgatgaatttcatcaataaaaagaatcgtcttttttccatacattccctgcagatcttttgcttctttcactacttcttccatatctttctttccggcaactgtcgcattgatctgtttgaactctgcgctggttgtatgtgcgatcacctttgccagtgttgtctttcctgttcccggaggtccgtaaaaaatcaaagaactcagcttatctgccttaattgcccggtaaagcaatttatcttttcctatgatatgcttctgtcccactacttcatccagtgtcaccggacgcatcctggatgcaagcggggattccttctctttatttgtctctctcatataatcaaataaatccatctttctctcctgttttcaatcttatattcacatcttcaatccataatcagatgatccactgtcacaaactcatagccttttccctgcagcagatctacaatccgtatagctgcctgcacagaagaaggataacaatcatgtaataaaataacatctcccggatttatctcttccacaactgtttttacaaccgcccctgtatcttcggtcatccagtccagcggatccaccgtccatccgatatatattctgttcagatcttgttcgctgtccaccgggagttccccgtaaggcgctcttacgaacaccggttgttttcccgttatcttttcaatcactgtatctgtctgttctagttctttctttgcttctcccgtttccagctttgacagattgcaatgcgtataagtatgatttccgatcaaatgaccttcctcatacattcttttcacaattttttcattctcgtctttttctacattttcgccgatcaggaaaaaggttgcccgcactttacgttccttcaatccatccagtagaatcggggtcgaggatgcatttggcccgtcatcaaatgtaagcgcaacaactggttttacctcatctgatacattctgacttcgcactgaatcagatgaaacgctcattgtttttctcccatccatctttatcagaaatggggacatacccaaaaacaccagaagacagaaaaactgtactacataaccccatctttttccagacatcatgacagcttcccgcctttgacattcttactctattcttatgtcctgcacctcggcatcattccttcttttttctatgcttttctctgtattccgtcggacttgtcttcttcactttccggaatgccttcgaaaaataaagattattctcaaaaccaacagaatatgcaatcgccgaaaccgacagccccgtctctttcaacagacggcaagcctgctggattctatattctgtcagatattcttttggcgaacaattcatataggtctgaaaagagcggaacagatgacttctgctgattcctacatagtctgcaatatcttccaccgtcacgggataagaataattggtttctatatagttttctgccttttctacatacaaaagctttgcatctctttcctgatcttccccttcatgatagtgcataaagactgacagaagactgtaaagtgctcctgtcatggcaaccgcttcttcatacccattgccctttgcattataaatctgttccaatccattccgaatctggtcatccggcacatttcctctttttaaaaaaggacgttctttcaaaaaacctgtatttcgaatgatcgatgccgcatccgtccccatgaatcctgcccaggcatattcccatggctcctgctgatcggcataatactttacttccacgcccggatataagataaaagtatctccggcttctaatttccatgtcttttctccaactgtatagtatcctgttcctgacaaaatatgatggatacaataatgatccctgactccgggtccccactgatatcctgcttcacacatttgatatcccgtgttatatacagacagcgaagtcatcagaatttctcctgacttatacgaatgtttgtaagtctctgccatcttccggctcctttcccgtatcctgtgatctatgatgtgagtgccaaaaaaaaattttgccactcactgctgtaaccggattgctccattgctatgcaattcccgcaatcctcatcatcattattataacacctcgtctttttaatgcaacattattacataccacagcacgtattttttatagacgtttccactcgttaacgctataataaatataaataaatcagatcgatacgattactttaaatggaggtaaataatgatgaagaaaaaattgtttgatatgtttgcagaactttttggtgattccgaaggagctcgtttttacttttctcctggacgcgtgaatctgattggtgaacacacagattataacggtggacatgtatttccatgtgcactgacacttggtacttacggtgccgcacgcaaaagagaggataacaagatccatctttattccatgaatctggactcctttggtgttgtagaagcatctcttgatgatctgacaaataaaaaagaatacaactgggcaaactatccgcttggtatagtctgggcattcaaagaaaaaggacatacaatcacaagtggttttgatatggtaatctggggaaatatcccgaacggttccggactttcctcttctgcttcccttgaagttctcactggtgtgatcctgacagacctgttcgagatcaaagatctttccatgacagatcttgcactgatcggccagtattctgagaataacttcaatggatgcaactgtggtatcatggatcagtttgctgttgccatgggtaaaaaagaccacgcaattttccttgacacaagtgatttaagctacgaatatgcaccttgcgttcttgatggtgccaagattgtaatcacaaacagtaaagtaaagcatagtcttgttgattctgcttataacgacagaagaaacgaatgtgctgctgcactgaaagcacttcagagcgaacttgacattcaggcacttggcgatcttactcctgaagaattcgaagcacacaaatccttgatcaaagatgagatccagttacagcgtgcaaaacatgctgtatacgaaaaccagcgtacaatcgatgctgttacagcactgaaagccggagacattgaaagcttcggaaaattaatgaatcagtctcacatttcactgcgtgatgattatgatgtatcctgtgaagagattgatatccttgtagaccttgcatggaagattcctggtgttcttggttcccgtatcacaggcggcggatttggcggttgcacagtcagcatcgtaaaagatgaatccatagatacatttatcgaaaccatcggaaaaacatatcttgaaaaggtaggacatgaagctgagttctacacagtagatatcggagacggtgcttctcgtctcgactaatactcgtctctactgagatcagatatgaagtaacgtatattttgttataggaatgccattggcattccttaatttaaggaggtccttgacatatgctttatgatgcgatcaaaaaattagtacagtacggaatcaataccggaatcactccggaatccgaaagaatttatacaacgaatcttcttctggatctgttccacgaagataactatgaagatgttgactgtgatctgaacaatcttgttctggaagacattcttgcagaacttttagatatcgccgcagaacgcggaatcattgaaaacagcatcggctaccgtgatttatttgacacaaaactgatgaataccctgatgccacgcccatcacagatccagcagactttctgggaaaaatataaagtttctccggagacagctactgattattattacaaattaagccaggacagtgattatatccgcagataccgtattgctaaggaccgcaaatggacggttgacacaaaatacggcactcttgacattacaatcaatctttccaaaccagagaaagatcctaaagcgattgcagcagcaggaaaagcaaaatcctcttcctatccaaaatgtcagctctgtatggaaaacgaaggatatgcaggacgccttgatcatccggctcgtgagaaccacagaatcatcccgatcacaattcaggataacccttggggattccagtactccccttatgtatactataacgagcactgcatcgtattcaacggacagcatgttccaatgaagatcgaccgcaatgccttcgaaaagctttttgatttcatcaaacttttcccacactacttcctgggatccaatgcagaccttccgatcgttggcggttctatcttaagccacgatcatttccagggtggaaattatactttcgcaatggctaaagctccgatcattgaacacttcactgtgaaaggttacgaagatgtaactgccggtatcgtaaaatggcctctgtctgttatccgtcttcagagcaaagaagtaaaacctctgattgatctggctgaacacattttaaatgcatggagatcttatacagatgaagatgctttcatcttcgctgagacagacggtacaccgcacaacacgatcacaccgattgcaagaaagcgtggagatctctacgaactcgacctgacattgagaaataatatcaccacagaagaacatccgcttggtgtctaccatccacatgctaaactgcaccatattaagaaagaaaacatcggtcttatcgaagtaatgggacttgctgttctccctgcaagattaaaaggagagatggaacttctgaaagattacatcttaacaggaaaagatatccgcagcaatgaacagattgcaaaacacgctgactgggtagatgaattccttccgaattacacatccatcacagaggagaatgttgaagagatccttcagcaggaagtcggaaaagtattctgcgaagtactcgaagatgccggagtttataagtgtgatgaaaaaggactggaggcattccatcgttttataggggtgttgtaatttgttgaacttggattcggtcaacaattgaaacaaaaacttttaatagtaaaggtcgtgagagggccactgtattgcatcggacaccggcccgctttacctcatccctttgacaatctgtaacgaaaaagccagagcactcaccgtgtgtgattcgtgtctggctttttctaacagattctgcaaagtgtattcggaacgctcctgccttaaatgtgtcctcaacaatacaatggctccctcactcggtttttcaaatgagtagtacctgttccaagtggaacgaatccagaaaacaaaatacaaacttagtacgtgcgtaaaaaggggacgattatcttagtcgataaaacatccgtttacgtttatctacagattctgtgatttgttttctggatttgtctgattggaattaaatatcccatttggaatatgtaagcaaggacagtcctgctgttgccacgagcacatgtaaggcaggagcgttccgaatacactttgttcagtatgttaataagagccagaacaggcaccacacacggtaactgttctggctcttatgttacatactttcaaagggatgaggtaaagcgggccggtgcttgtggtaatagcagggctggccttgcgttcccttttcctacaaaactgattgtttcaactctcaaaatccaagttcaacaaacacacaccaattagtacagcttcgcactgatcagttttggtctgaatccagccttatcaagtgtatccagaatcttcttcttatgatctgttccgaatgcttccattgtgatacgaagctctactgctgcgtttctgtttgtgcttacaaactggttatgctccagcttaatgatgttaccctgtacgtctgcgactgtctgcgccacacgtgcgagttcacccggcttatccggaaggagtacggatacggagaagatacggtctctctggatcaatccgtgctggacgatcgaggacattgtgataacatccatatttccaccacttaatacacagactactttctttcctttgatgtccatctgctttaatgcagctacggaaagaagtcctgaattttctacgatcatcttatgattctctaccatatcaaggaatgcaccgatcagctcatcatcatctacaagaagtacttcatctacattttctttcacatatgggaggatcttatctccaacttcttttacagctgttccgtctgcgattgtatttgcagatggaagttctacaggctctcctgctttcagggctgctgtcatactggccgcttctgacggctctacaccaactactttgatctttggattcagcatcttggcaagtgtggaaacacctgtgatcagtccgcctccaccgattggtgcaaggatataatctacagtcgggagttcctgaacgatctccattgcgattgttccctgacctgtagcaacatcaagatcattaaacggatgaacgaatgtatatccgttctcttctgcaagtttacatgcatatgcgtaagcatcatcataaacatcaccatgaagtactacgtctgctccaaagctttttgtacggtttactttgatcagcggtgtaactgtaggcataacaatcgtagctttgcatccaaactgttttgctgcaaatgcaacgccctgtgcatgatttcctgctgatgctgtgatcagtccacggcttctttcttcgtctgtcagtgtgctgatcttgtaatatgcaccacgaatcttataagctcctgtgtgctgcatattttccggttttaaataaacctttgctcctgtctgtgcacttaagtattcactgtaaatgagttttgtaggatttgttaccttttttaccagttcgctagcttcttcaaatttctctaatgtcatcatggtctttcttcctctctgtaaaacaacgcgtttacgaactcctctgagtcaaatttctgcaagtcatcaattgtttctcctacaccgatatattttaccgggataccaagttcagactggattgctactgcaattcctcctttggctgttccatccatctttgtcagaacaattcctgttatatctgttacttcattgaattcctttgcctgggcaagtgcattctgtcctgtcgttgcatccagcacaaccagcgtctcacgaaacgcatccgggtactctctgtcaatcacacgattgatcttcttaagctcttccatcaggttcttcttattgtgaagtcttccggctgtatcacacagaagtacatctgcccttctcgctttcgcagcagcaaccgcatcatatacaactgatgccggatctgcgccttcctgaccgccgatcatctcaacaccggcacggttggaccattcttttaactgctctcctgcagccgcacggaatgtgtccgctgccgcaaggatcactttcttattctgtgctttcagctttcctgcaagtttaccgatcgttgttgttttgccaacaccatttactccgatcacgaaaaccacactctgacgattttcaaattcgtatgctgtctctccgacatccatctgttcacgaatactgtcgatcacaagctgtctacattcaatcggttccttgatatgttgctcttttactttaacctttaaatcttcaatgatatccattgttgctctgacaccaagatctcccatgatcagagtttcttccagttcttcataaaagtcatcatcaatctttgaaaatccatggaaaatactgtccatgccggacacaatattatctcttgtctttgtcagaccggatacaagtcgtttaaaaaatccctttttttcttctcccattttcagcctcctgttctcttaataccctgtttacaataaaaacaggtttatttttccagatcatcttccaacagatccacagaaacaagtgtagatactcctttttcctgcatggtaattccatacaaccggtctgctgctgccattgtaccacgtctgtgggtaatgacaatgaactgtgtatattttgtcagcttatgtaaatatttcgcataacgatctacattgttgtcatccagtgccgcttcaatctcatcaaggagacagaacggagatggcttcagattctggattgcaaatagtaatgcaattgcagtcagcgccttctctccacctgaaagctgcatcatattctgcagtttctttcctggtggctgtgcgatgatgcgtattcctgcctcaagaatatccacatcctcctgtaattccaatgatccctttccgcctccaaaaagctgacggaatacatcattgaactctgtcgcaattcttgcaaactgttctgtaaactgcttgcgcatcgccacatctaattcttcaataatctgttcaagagatgcttctgcctctacaagatcatcatgctgaccttttaagaatgtataacgctcggatacatttttgtaatcctcaattgcattgacattgaccgaaccaagctttcggatctcattcttaagctcctggatttttttcttcatcaatgccagatctgtcagtgtctcattacgaagttctttcgcgtgattgtaagtgagttcatactcttcccacatataattcatctgcttctctgacgcttcctcatagccttctttctggctgttcagacggaaacattctttatcaagatctgacacatgctttgcaagttcttctctctgtcgtaagaaatctctgtgcttctgattcagttcttcgcgttttttactctgtactttaatctcttcaccaatctctgtaaaaagttcttttgaatcttcaatcgttttcctgagtccttcgatttcattttctttttgcagaatttcctcagatacatctcctcgattttcggcaagttcttcctgctctttttcatatctggtgatttcctcatctatacgggaaatattttctacaataaaggttttctgctgatccaggcctgccagtgagagatggacttcctcagactgtttcatctggacagcctcatcctctctttctttctccaactgcatctgcaaagcttcaatctgttcgttcagttctttttccaacttctctgatgtctcaagttccatctggatagaatcttcattctcattgatttcatccagctcctgaagcaatgctttctgttctttcagaaatccttcgtaacgctgtttcgattctaactgttctctctgtacctgtgcaacattcattcgtgcagtattctccagcactgattcttctcttaaatgttcctgtacttcatcaatcacattgtagcatgctgcacgacggttcttcgcctctgtaacttctttttccagcacatccatgtcagccttgagcatatcaaccgtcttttcgaattcttcgatttcgcggcgtctgctcagcagattacttgaattcttaaatgcaccacctgtcatggatccgcccggattgatcaggtcaccttccagtgtgaccagacgcagagactggcggtattttctcgcaattgcgattccgtgatcgatgtggtctactacgatcgtacgcccaagcagctgatctgccagtccgtcaaatcttgattccacatggatcaatgtattcgcaagtccgatcactcccggttctttgagtgcgtccggattcctgattcctccgccaccatgcatacttgtcagcggaagaaatgttgcccttccgaatttattacgcttaaggaaatcaatcatacgcttggctgtatcttcattatctgtaacaatattctgaatacttcctccaagtgctgtctcaatagcgatctcatattccttatcgaccttaatgatatccgctacaacaccaatcagacctttctcacgttctttattcgacattacctttcggatactgttaccatatccgtcatagcgctctgtaatattctttaatgactccagacgggaagactctctgtgataagcggtctgtccgatccgtaacttttcctgcttctctttcagctcattctgaagcttgccaagttcccgttcgttcagggaaatcttatccttataggtttgaatgcgctcacggatctgaccaagttcttcttcatacttcttaagtctgttgttctgtccttctgctaccgtcgaaatctcaagaatatttctggcaacgacagccttccgtgtctggatctgttctttcgtcgtatcaaaatgctgaatcttagcttttgtcgaagcacgatttccaagcagatccatgatctcccgcttcttctgctcaatttcagtactgtgttctgcaatctttgactgaatctcaattaaactctgctgtgcttccgtatcctgtccactggctgattctaactgttctgaaattcttttcttctcttcttcaagctctcttttctgctgctgccttgtatctatctcgctgacgatcgtactcaggcgatgatcataatgctcatcattcatacgggctgtattaatctgctctttcaggacattgatctggccttccagctgttgctttaaaagattcgtctcattcatctggttcttcgcagtttcaattgcaagatcaatctgatctacttcttcctcgattgcctcgtattctgctttcatcttctcataacgggcatttgattcctgcatctcctgagaagcaatctcatatttcccactgacttcacgaatacgctcctgcagccgctcttcctccaacaaaaacatattaatgtcatatgtttttaattcttctttcatcttcagatagattctggctgtctctgactgtctttccaaaggaccgatctgtttttcaagctctgcaagaatatcattcacacgggtaagattctgccgttcatcctccagctttttcaaagaaagggactttcttctcttatattttacaattccggcggcctcatcaaaaagttctcttctctcttccggcttaccgcttaagatcttatcaatctgtccctgaccgataatcgaatagccttctttaccgatacctgtatcatagaacatctcattaatatctttcagtctgcaggctgaaccattgatcagatactcactctctccggatctgtacaatttacgtgtaacagtgacttcttcgtactctaccggaagtttatgatctgaattatccagtgtgattgcaaccgaagcataactaagtggcttccggttctcggttcccgagaaaatcacatcctgcatggtgcctccacgcagctgcttcactctctgctctccaagaacccagcgaacggcgtcagcgacattactcttaccacttccattcggtcctacaatacctgtaattccgttatgaaattcaaatttaatcttattggcaaaagatttgaatccctgcacttctatactctttaaatacataaagtcctctttactttttctttctgagattcagaattgcctcataagctgcctgctgttctgctgacttcttcgagcttccttttccacgtccccaggcttttcccccgattcttgcttccacttcgaaaatcttattatgatccggtccctgttcatcaatcagttcataacttacattccccgtcatattcgcctgcacgatctcctgtaagatcgttttactatcataaaagagttttttatcctctaaatctgtcaaaataaaatgatggataaactcttttgcattagtaaaaccaccgtcgagatagatagcaccgattaatgcttccatcgcatcagatgtgatagaatctctttttcttccaccggtcgcctcttctccttttccaagaagcaggtaatctccaagtccgatatctcttgcacacattgccagagacggttcacataccatacttgcacgtgtctttgtcagttctccctcagatacctttggaaattcattaaataaataagcacttgataccaattccaatactgcatctccaagaaactccaggcgttcattacactcatatttcttcaaatgtttctcatttgtataagaactatgcatcaatgcacgttcaatcaggcttttgtctttaaacacatatccgatcttttgttccagttcttttactctgtccatttaaatggcctccttcgtgttaataaacgaaaaagcccaaacgggctttttcatctcactatctgattattcattagccttctttttctggatctgatcaacagcatcctgcactgttgtgatcttctctgcctcttcgttatcgatctcgatgtcaaaatcttcttcaattcccataatgatctggaaaatatccagagagtcagctccaagatcatctacgaatgtagtatccggtgtgattgtctccggtgaaacattaagtacgtccgcaataattgcctgcagtttttcaaattctgtcattgtaaaactcctcctgtcttattcgacttctttcttttcttccagggtctcctgttgaattgcctcttttatcttctcattgatcttctgctccttaaatgcaacacactgaatgattgagttgcatacctcctttgactttgaacttccatgtgtctttactacaagtccgttcaggccaagaagcggtgcgccgccatactcacttgtatcaaaatctttcagtacgccctttaaagcaggtttcacaagcagtgcccctatcttactacgcaaagaagaaagcattcctttcttcactttcttaagcagtgctcctgcaacaccctcataaagcttcagaataatattacctgcaaatgcttcacagacaatgacatctgctgctccgtaaggaatatctcgtgcctcaacacttccaatgaaattgatgtcaggacattcttttaacagtgggaatgtctctttcaccagcgcatttcccttctcttcttcagcaccgatattcacgataccaactgtcggattcttctttcccataacgctttccatataaatggatcccatctttgcaaactgtaccaggtgagatgggcgtgcgtctacattagctccacaatcgatcaaaagtgaaacaccttttaatgtaggaatcagtggtgcaagcggtggtctttcaacacctttgatcctgcctacaagaacctgtcctccaacaagaacagctcctgaacttcctgcagatacaaaagcatctgcttcccctttcttcaccatcttcatcgcaacaacaatggatgaatctttcttaccacggattgctttcactggaggttctgccgtctcaataacctctgtagcattcacaatctcaatctgctcctcaggatacgtataagcggagagttccttgcgaatcacatcttccttacctgtcagcagtaccttgatatcttttctcttccgcactgcctctacggcaccttttaccatctctcttggtgcattgtctccacccatggcatcaagagcaacccttgtaatctctgacatatcatttcctccttgcgctactgaaattattctactggatatcagtataaaaatcaataaaaaaaggcgtaaaacacaaagtttttacgccctcaagtgttctgttcgcagtacactcaatatcttattgatcattagtcaactgaaacgatctcgcgcttgttgtaagatccacacgccttacatacacggtgtggcatcataagctcgccgcacttgctgcatttcaccagattcggtgcgctcatcttccagttagctcttcttttatctcttcttgcttttgaagatttattctttggacagattgacataggttacacctccttaaaattcttaaataagtcacggacaactgacattctcggatcaagccctgtatcttcacagttacaagaccccgtatttaaattctgaccgcatacattgcataatcccttgcagtcttccctgcaaagtactttcgtcggccagctcgacaaaatctcatgaaagagcagtttgtccacgtcaagatgatatccgtcaataaagtttgattcatccagctcctctgtcagttctgcgtcggagaggcctacgtccacatgtttcacacaattcagttcaaactcccgtttcacatcctccagacaacggtcacatggaatcatgacactcaatctggtctcagctgtgatgagcagttcttttccccttatatgctctactttaacatgaaccggctccttgctgataatggggtaggttccggattgtaaccggatctcttccatctccagccgcacagtttcttcaaccgtcttatgctggtctgacaaaacgtctgataggttaatcaacataatgtatttctcctattcatacctaaactattatatcatggaaaaaatgtttgtcaacagatatttataatttctatcaaaaatattatgaagagcaaaatgtattggatacatttttgtttcttctatgcgcaaaagcaggactgaactgctttcttggcacctcagtcctgcgctcatatacgatataatctttacagatcactatcgtatacactttctcaaattaagatttcttcaattattttacaagcgctaatgtctcacgggcgattgcaagctcttcgtttgtaggaataacgaatactttaacctttgatccttcttttgtaagctcagcttcttttcctctgagtcctttattcacttctgaatcgaagtctactccaaggtatccaaggtatttacatacttcttctcttacataatcatcgttctcaccgataccagctgtaaatacgatgtcatctacaccattcatagctgcagcgtaagatccgatgtattttgctactctgtatgagaatacatccatagcgatcttagctttcttatctccggcattcatagcgtctgtcaggtcacggaagtcacttgaaagtccgcctgaaattccaaatacaccagactttttgttcagtacttccataacaccttcaatgtcaaggttctctttcttagcaatgaactccatgattgcaggatcgatatcacctgaacgtgttcccattacaagtccttcaagtggagtaagtcccatagaagtatctacacattttccgttaagaacagcacttacactggatccatttccgaggtggcatacaattgtctttacttcatcgtaagattttcccattacttctgctgctctcttagatacgaagctgtggcttgttccgtggaaaccgtaacgtcttactttgtatttctcatagtactcatatggaagtccatacatataagccttctccggcattgtctgatggaaagctgtatcaaatactgcaaccataggtgttcctggcatcagtttctcacatgctgcaacaccgatcaagtttgccgggttatgaagcggtgcaagatcattacactcttctactgctttttttacttcgtctgtgattactacagatgaagcaaacttctctccaccatgtacgagacggtgtccaactgctccgatctcatcaaggctcttaacaactcctgtcttctcatttgtcagagcatcaattacaaactgaattgcttctgtatgagttggcatagccagatcagatttctctttctctccgccagccggctgatatgtcagacgtccgtcgattccaattctctcacaaagtccttttgcaagtacattctctgtctcagcgttgatcagctggaatttcagagatgagcttccgcagttgattactaatacgttcattttcttttttcctcctgaaaaaaccttattattattatccgagggcagctcacactaccctctttgtttcttttgattacccgtaactattttaaaaaatctgtaaacaattacaattattcagcctgtgcctgtacagctgtgatagctacaacgcctacgatatcttcagcgctgcatccacgggaaaggtcgttaaccggagcggcgattccctgtgtcagaggaccgtaagcttctgctttagcaagtctctgaacaagtttgtatccaatattaccagcatcaaggtctgggaatacaagtacgttagcatgtcctgcaaccttgcttcccggtgctttagattccccgacggatggaacgatagctgcatcaagctgaagttctccgtcaagagcaagctctggtgcgagttcctgagcgatctttgttgcctcaacaactttatctacatctgcatgtttagcacttccctttgttgagtgagaaagcatagcaacaactggctctttctcaacaagcagtttgaaagaatctgcggatgaaatagcgatgttcgcaagtttctccggatctggattctgctcaagtcctgcatcagcaaagataaatgttccgtttgctcccatgtcgcagttcggtactaccataaggaagaatgcggatacgagctttgttcccggttttgtcttcagaatctgaaggcatggacgaagtgtatctgctgtagagtggcatgctccggataccattccgtctgcatcacccatcttaaccatcattacaccatagtataagtaattgctaagaagcagttcttttgcctgctcaggagtcattccctttttctgtcttaactcaacaagttttgcaatatatccttctgttcttgcatctgttgcaggatctacgattgttgcaccggagatgtcgtatgtacctttgttcttctcaatctcctctttgcttcctacaagcaccagatcagcgagtccttctttcagtactgtctctgctgctttgtaagttctttcgtcctctgtctccggaagaacgattgtctttttgcaagctttcgctcttgctttgatttcatcaataaatcccatgatttaatgccacctttctttttatctcacttagtcctattataactcaatcgttttttgtatacaagtcattttatgtgcattttcaaatacaatccgaactttgtaataggatatttgtaagattgttacaattttatcaaacattgtctttttctaagaacattacgagccagaacagtcacctctcacggcaactgttctggctcttattaaaatttacaccttcaaaaccccttgcttatattcattctgaaacgccgtcttaaacttatccgtcaccactgaggtatacagatttgaagcaagcatatcatgtctgagcattttctgaccaagttccggaagatcgtcaatttcagacattttcgtcaaaaccggaagactgctttccttcgacatagctgtcaaaagctttgcattgtcttttcgaaaaccaagcagacgtgcatacatatgatagccattgtcaatatattcttccacatttgcctttttcgtcccaagcataatatgaagcaatgcccggttaactcgggtctgcgtaagttctcgtgtttttagcaaatcacagaactgtttataattaaaaaagttgtttaactgattcgcaattctggatgcaatctccggagagacatccacatatcgaaccagactttctggctgtttatttaacagtttatatttcaaaatcagagaaaaatcattctgtgaaatcggatactgtactttatgataatccttcaaaagttccagacaacattttggaacctggttttccaactctgacagtattcccgaaaacgaaagctcatcgtaatttccttctactggttctgtattgaaagatgaacttgaataagcaagcagtgaacgaattgccgtagcggaactgtaatcactgtccagttcttcatcatgatactgtgcaccacgtcttgcaatcgtataaggttccatcctgcttccaagttttttgattgctttcaaatattcaatccccaaaatattgttcggatttcttaaaatctctgcaaaccgagaatcttctgtataagaaagaattgcttcctgtctggcgcgtggaaaagacatcccttgtttcagataatctttcaacagaatctggtaggcttcaggttcttcaagaagtagttctgcaagctgttccaagattgggagatcatcacattcactgccaaaacagatagaatcaacaattccaagagactctaaaagagatacggatccaagtgcaaaaagctccgcagatcccgtcgcataacagaccggaagttcaaagacagctccagcaccacacatcagtgccatctctgcacgtatccttttaggcatgattgcaggtgttccccgctgcacatagtcgccactcataacaacaacggctgcatctgcaccggttacacgcaaagattctttaatatgataaagatgtccattgtgaaatggattatattctgtaataagaccaacgattttcataatattctcctaaaaaaacagagtactgctcacaccacgtgtgaacagtaccacctctcaccaatacagattatgtaactgttcagagccaacttccaaaatgctacgcatttcgtcacagttaccagtttacaatctcttcatgcaagtaatcgccagtgcccccggaccaatatggcaggccacactcaatgacaatggtccttccataatctcatatcccggaaatctttcttcgatctctgctttccactcctgtgcttcttctttactgcatgtgtaagccatgccaagagccatctgatccttaacatcggcaaagcgtccattcagatctttctcgattgcattgagcattgtcttcttcgccgttttccagcctcttgctttcgaaaatgcgtccagcttttctccctggatctgaagaacaggctttaagttcagcactgttccgattgccgctgccgccggtgtgattcttccaccttttttcaggtattttaaagtatccaccgtaatataaatgcttgcctgaagtttttctttctccagtatttctttgatctctgctgcactctttccttcttcacgcagattcattgcatccagaacagactgctcctgtgtaactgaaattctctgattatcaaccacctggacgcgtccgtcatattcagctgcaagagtaattgctgttgcacatgtgctgctcaagctactggacatcggaatacatacaagctcatcatattcttccagaactttatcccagagatccatgacctctcccggggatggctgtgatgttgagatatcggaatctgctccgagcttttcataaaattcactctgggaaagtgtgatatcctccagataaagttctccatcaataaaaaatggcatcggaagaacaaaaatcccaagctcttttccctgttcctgtgttataccgctattactatccgttacaattgcaactttactcatcaaatttctccctcgttaattcttaaaactatgaatcggcgccggaatacgtccctgtctgttgataaacgcatcacatccaaattcattcaccggcataatcggtgcataacctaacagtccaccaaattctgccacatctccaacgtctttaccgatgaccggaatcagacgcactgctgtcgtcttctggttaaccataccaattgccatctcatctgcaatgattccagagattgtcgctgctgatgtctttccagggattgcgatcatgtcaagtcctacagagcatacgcatgtcattgcctctaacttctcaagtgtaagagatcctgcatttactgcatcaatcattccctgatcttcactgaccggaataaatgcaccgctgagtccgcctacataagaagatgccataacgccgcccttcttcacctggtcattgagcattgcaagtgctgctgttgttccaggtgcaccaacgcgctccagtccgatttcctccaggatctctgcaatactatctccaactgccggagtcggagcaagagaaagatcaatgattccaaatggaattccaagacgtgcagaagcctctcctgcaacaagctgtcctactcgtgtaatcttaaacgctgttttcttaattgtttcacagagttcttcaaaaccttttccacgtgctttttcaatcgctttctttacaactcccggtccgctgacacctacattaataatcgtatctgcctcagtcacaccgaggaatgcacctgccataaacgggttatcatccggtgcattgcaaagaataacaagctttgcacaaccaagagaatctctgtctttcgttgcctctgccgcttctttcacaatctgtccacacagacggactgcatccatattgatacctgtctttgttgatcccacattgacggaactacagattctctctgtctcggccagtgcctgcgggattgaacggatcagattctcttcacttggtgtcattcctttcgacacaagcgcggagtatccgccaatgaagtttacacctactttttccgctgcgcggtcaagtgtacgtgcgattgtcacataatcttccggagtcttacacgctgctgctccaacaagcgatacaggtgtaattgaaattctcttatttacgatcggaattccgaattctttctcaatgtcttttcctgtagatacaagatcttttgcaactgttgtaatcttctcataaatcttacggttcagttcattcagatcagaatccacacagtccaacagactgattccaagagtgatcgtgcggacatcaaggttctcgctttcgatcatcttattggtttctgatacttcatacatattaatcatagtcttatcctcaccttatctccgacttcttacagacggtgcattttctcaaaaatctcttctctctgacaatgaattgttacaccgatctctttgccaagtacatccatctcatcacaaacttctttgaaatctttcttcagattcgcaacatctacgatcatcatcatgttgaaatatccctgaacaattgtctgtgaaatatcaagaatattgatttcattttctgcaagatatgtacatacttttgcaataattcctactgtgtcttttccaagtactgtgacaatacatttcttcattctttctgtacctccgctttgattcactcaattttatacattaataatatccgaaaccgattcccggcttgcaacgaacatattcaggtcttcccctttatattcattatctgcaagcgtaacttccaacttcactgtctcataagcaagtcttgcgtaattgttctccttgctcagatgaccaagcatgatgtgtttcagattatcatgtagtatatcacaaagaagctgtcctgacaattcatttgataaatgaccgcgatcgccaagaattctctgcttcaaataatatggatatcctccgacttccagcatatggatatcatggtttgcttccagaaggatcgcatccagatttttcagattcttcactgtataatcatcatattttccaagatctgttgcaactgctacggacttcccaccttgttcaatacgatatccggacggttcatttgcatcatgggaaatagcaaatgggtgtacgtccagttcaccaagctgaaatgggtgatctgccttaatcggatgtaaaagtccttccggcatctttccaagactagaagactctttgattcctgcaatcgttcccggagtcgcataaattggtatctcgtactttctgctgaacacaccaagtcccttaatatgatccgaatgttcatgtgtgatcagaattccatcgagttcgtcccctttaatctccaacttattcagaccttcttcaattcgtttcttactaatccccgtatcaatcagaagatgggaattatcacttcctacatagatacagtttccactgctgccgcttgcaatactgcacattctcatttgttcaatctatctcctatttgtctctttgttgcttcaaagtctccactattatcaattacaactgtgcatgcctttcgaaatacttcttctaccggttgtgaagcaatcattctggtgatcttttcatccgtataatgtctggaacttttcagtcgttctctccgaaccgcttcatctgtgtaaatataccataattcatcacacagttcctttcctacttccggaagaagtgctgcttctacaatataataagaacaacactcttcttttttcttcaagatgtctttccgaacccattccagcacttccggatgtacaatatcattcaatctttgtaatttcttctcatctgcaaatacgcagcttccaagtttcatgcgatccagttcaccatctgctccgacaatctgttcaccaaattcctgtacaattctcgaaaacgcctgtgtccctttcttctggatctgctttgcaacttcatccatctggcagactaccgcaccgtattcctgttcaagaaattttaaaacttcactttttccggagccaactccacccgtaattccaattactttcatcttattttgcctcataccagttcttccctgtatgcatatctacgctaagcggaactaacaattctgctgcatgttccatcttatcctgaagtatctgctgtacttcttctaattctgtttcatctgcttcgatcaaaagttcatcatgcacctgaaggatcatccgtgatttcagatttctcttcttcagttcttcatttacatgaatcattgctattttaataatatctgcagcagttccctgaatcggtgcattcattgccacacgctctccaaaacttctctgcataaaattgctggattttaattccggcatcggtcttcttcttccatataaagtctctgcatatcctttttctttcgcatcgctcacacatttatcaagaaatgtcttaattcccgggtaggattcaaaataatgctcaatatactgtgccgcctcttttctcgaaatactcagatcctggctcagtccaaaagaactgattccatacacaatgccgaaattaactgcttttgcatttcttctctgcagatctgtcacttcatcaaatggtacatggaatacctgggaagctgtcattcggtgaatatctctcgcttcacgatatgcctggatcagctgttcatcaccggaacaatgcgccagaatacgaagctcgatctgagaataatccgcatccacaaaaacacagccttcttttggtacaaatactttacggatcagacgtccaagctccatacgaaccggtatattctgcagattcggttctgtactgctgatacgtccggttgccgtgatcgtctgattgaatttactgtggattcttccatccatccctatataatttgcaagtccgtccgcatatgttgacttcagttttgcaagctgacgatactccagaatctttgctacgataggatattccggtgcaagtttatctaacacatccgctgctgtagaatacccggtctttgtcttctttgcatgaggcatttccagtttttcaaaaagaatcacgccaagttgttttggagaattgatattaaactcttcccctgccatttcataaatctctttttccagctcaatgattcttgccccaagctcttctccgtaacgcttcagctcttcaccttcaaccttaacaccggcctgttccatatcatacaatgtaaatactaatggcatttcaatttcattaaacaaacggaacattccattctcttccagtttcttctcaagaaccgggacacaggcataagctgtatatgcttcataacatgattttgtaccctcatcaagtttttcatcaattaaaagattcaaatgttctcttgccacatcttctgcattgtaatcatttttcagaggattcagaagatatgctgctacgattgcatcaaacccgttctcacttgtaagctccggcagccattccagatattctttcaatccacacattgaaaaacatttcacactttttgcaaggtgagacaactttcctgtcagatattcaaaatcggcatccatatcacaaggaatcgtaacaatcttttctgcttcatagcaaagagaaacccttccgtatcctgaagcatgtgcaaacaatgggaggacatttccagcatctttggaaaatgccacaccaacggtctctgctttctccgcctctttaaagactttctcaatttcttcttttcctgttacctcacgaaaatatttttccacatcattcactgacgcttctacatcaaatcttccaagcagatttttaaactccagtctttggaataattcatgagcttcttttgtataaggattctcatgtctggcattttcaagttcaaaggtaatatctgcgtccagtttaatcgtcgcaagtgtcttactaagctgtgcctgctcccagaattctttcagattcttgcttgctcttggcggtttcagctcatcaacatgctcgtatgcattttcaatcgtctggtactgctgaatgatctttgtcgctgtcttttcgccaactcccggaacaccaggaatattatcagcagtatcacccatcaaagcctttacatcaataaattccttcggtgttactccatagcgttcctgcacatctgccgcataataatcttctacttccgtcttcccctgcttcgtctttgggatgcggatcttaatatgctctgtcgcaagctgaagcgtatcacggtctccggaaatgatggaaacatccattcctttctcctcacaacgatgagacaaggttcccaaaagatcatctgcctcaagtccggccttttcaatcacttctatatgcatcgcacgcagaacgtccttgatcacaggcacctgttgacgcagttcctctgccatcggctttctcgtacccttataatctgcaaacatctcatggcgaaatgtcggcgcatgcacatcaaatgtaaccgtcagatattccggcttctcttcatctaatatcttaaacataatattcaggaatccataaactgcgttcgtatgcagtccttccgaattcgtcagatccggaactccataaaacgcccggttcaatatactgtgtccatcgatcagtacaattttatctctcatcagattctctcctattatctcttgctttttgttgcatttaattttaaccattattaaagtatacactaattaacttcttttttaaaggttcattttatggtatcattatttagggcttttgactccaatatcttgtaaacaatatttttaaaaatactatcaggagaattattatggatggaattatatttgatgtagatggaacactttgggattctgttgaagttgtagccgaatcctggaatcttgcaataaaagagaactctgatcttgagccaaacttaaaccgtgaaattcttcaggaactgtttggaaagacaatggacgaaattgctgccggagtttttcccgatctcgacccggactctcgaagaaaactgatggatatctgttttgattatgaaaaccgctatcttgaaacacatcccggtgtttactacgaaggcgttatggacacactcaaggagctggctctggaatatcctctttttattgtaagcaattgccagtgcggatatattgaagttatgatgaaaggcgcaggcatggaaccatatatcaaagatttcctttgttttggccagacgcagacttccaaagaccagacgattctgaaattaatggagaaaaataacctgacatcccctgtctatgtcggagatacccagggcgatgctgattcctgcaaaaaagccggtgtcccttttatctttgctgaatatggacttggagatgttaaggaagattatccgacgatacattcgttttcagaattaaaaaacattttaagagagcttgattaacatttctgtttatttaaaacaaactgacaaaccacacgaaacattttctgtccattaagaatttcattctgtttctgttgtgatctgtcagttttttattgctcacgacttttttcataatcccggatcttacgcatcaatccacgataaatcttatcctgaagcagttcccgatgttcatacgatactggatattcattcataaaatcgggatgttctcttatatagcaatccctttcttctttcgtcgcattcaacagatgtttttcataataatccatatcatctattttttctttattcatcactttctcccattccccttagttcttatgctgtctcatttctcgcacatttcttcatgtttttatcaattatagtcgtagtacgactataattcaatagtcgtgtcaggacttttatataataatccaaaaatacaaaagatatcagattattgttcactggatactgtgaacaatagcttgtttccggttaagttcgcacaccggctttaaggtacgaggatgggattatgaaattcgaaaacatacgaaatttgcgagaagataatgataaaacgcagaaagaagttgctgcatacctcaacatcaaacagactacatattctaaatatgaacttggaaaaatcaacgttcctattgatgtcttcatcaaacttgctgattattatacagtctcaattgattatctcgttggtcgtggaaaaaagtgaaattacaaagaacaaagaatgtgcagtgcgcatcctaagcggagcgttttttatatattaggaaaggactttcctaatatataaaaaaatctctggatatcttgcaaacattgaatttgtaagatattcagagattaagttcgatgccgctggccggactcgaaccggcacggctactaaccgcttgattttgagtcaagtgcgtctgccaattccgccacagcggcttattctgtcggacaagaaaactttcctgtccgaatcagcttttttatgttaccatatccggtcacatttttcaactatttttttatgattttatttgttttttatttgcaaagtttctttccaacctcaaaacaatcaaatgttgcaaaatagtctttcggtgtctctgcacggcgaatcatctgtacacttccatcttctttcaggagcagctctgctgattttaatttaccattatagttatatcccatagagaaaccatgtgcacccgtatcatgaattacaaggtaatctcccatatcaacttccggaagcattctgtcaattgcaaacttatcattattttcacacagagaacctgttacatcatatttgtggtcgcacggtgcgtcttcttttccaagaacagtaatgtgatgatatgctccgtacattgccgggcgcatcaggttaacagcacatgcatctactccgatgtagttcttataagtattcttctcatggattgcttttgtcacaaggcagccataaggtcccatcataaaacggccaagctctgtgtagattgcaacatctcccattcctgccggaacaagtacttcttcataaaccttgcggacaccctctccgatcacacggatatcattcggttcctgatccggtatgtaaggaattccaataccaccagaaagattaataaacttaatatgtactcctgtttctttctgaagacgtactgcctgttcaaaaagaacttttgcaagcattggataataatcatttgtcactgtattgctggcaaggaatgcatgaataccgaattcttttgcaccttttgccttcagtgtcttaaatgcttctgtaatctgctctgttgtcattccatactttgaatctcccggattatccataatatcattgctgatcttgaatattccgcccggattataacgacagctgattgtctccggaatatgtccgattgtcttctcaaggaagtcaatatgtgtaatatcatccagattgatgattgctccaagtttatcagcaagtttaaaatcttcctccggtgtatcattagaggaaaacataatatcatgaccatcaattccaactgcatctgacataagcagttctgtataagaggagcagtcacaaccgcatccatactctttcaagatctgtaaaaggaacggattcggagttgcctttacagcaaaatactctttatatcccggattccatgcgaatgcttcctttaatgcttttgcattctcgcggattcctttctcatcataaagatggaacggagtcggatatgtttttacaatctcttcaacctgttcttttgtcacaaatggtttcttactcattttcattttctccttcgcgtattttgattaattctatctcattcgcaagtgctgttttaaacagcgtaacgaaatttctctgtccggaatagacacaagtgtttctgctctcctgtccatactcacccgaaagtacatatttagaatctgtgatcagaccaatctgatttcctttttctttcgtcacataaatgatcgcccctgaaagttcaaatggatgatctgtcacaagaaccaccttttttcctttttctgtcagttcctttaactgtcctttcaactgttccagacagacaccggaacaggaacaatacactctttcttccacattagccagaagattatggatcttatctgaaatatgttcctgaccatcgatcgtaacatatccttcttcttctttctgttctcccgtaagattcatatccaaccacttctgttcttcttccattctgcggattctgttaccacagaactcctgaacatgaaccggaatatatcgcttggcatcctcttccaccagatatgcagcccctttctcaaccagagctgccagtgatgcatacacattcgatcttgagattcctgtatctctcgcaatctcataccccgtctgctttcctgcttcgatcagccgaagataaacagttgcttcctgccgggacattccaaaatgcatcagatattcaattgctttactttcgtccatagcaccatccctctgattagtagttctttacaggaacactatacagcattgattgttggatgtcaatatattgattgtatttaataagagccagaacaggcacctcgcacggtaactgttctggctcttattaaaagtttttctaatttaatctactgtcacaattctcatcatattacttgtaaagcttctctctttgcttacatttgttgaaggaattccagctgtgataactacaacatctcccggctcaacatactgttttacctgtgccagttcgatcgcattttcacagatatcttctgttgtatcaacttcaagagacttcagcggtcttacgccccagtaaatagacattcttctcagtgttctctcgttcggagttacaccaaggatttcctgtcttggtcttaagttggatacaactcttgaagttgctcctgatacagatggtgtaatgatacattttgcattcaggtttgctgctgccagtacggatgaatatccgattgcactggatactccgcctcttaaatgaccgtgctctttctcaagcatgctatcataatcaaggtgtttctctgtctgctcaatgatatgaaccatcatctgaagcgcctcgagtgggtatttaccctgtgctgtctctcctgagagcattacagcatctgttccgtcatatacagcgttcgcaacgtctgttacctctgctcttgtcggccgtggattacgcatcatagaatcgagcatctgtgttgctgtgataactgtcttgaactgatcgttacatttctggatcatcatcttctgaagatatggaagttcctctgccggaatctcaactccgaggtctccacgggcaaccatgataccatctgctgcacgaatgatctcatcgatattgctgattccttcttcattctcaatctttgcgatgatcggaatgtaaggagctccgagagacttcagatatgccttgatctcaagaatacactctgcatttcttacgaaagatgcagcaataaaatcaattccctgctctgctccgaatttaatatcttctttatctttctcagtgattgccggaagtcttaccggtactcccggtacattaacgccctttttctctccgagttcaccaccgttgatgatctcacaatgaatttctttatctgtttttccgattactttcagtccgatcagaccatcatcgatcaaaataatctttccttcacttacatcttctgcaagtcccttatatgtgatagatactttattctcatcaccaacaatatcttctgtagtaagtgtaaaggtcttccctgtttcaagcttaatcttctttccgtctttcagaacacctgtacggatctctggtccctttgtatccagaagaatagctgtcgttgcatgctcttcctcgcgaagctctttgagcatatccatacgacccttctgttcttcatgatcaccatgagagaagttgaaacgagctacatccatgccattctggatgagttttctcatcagttctctatcatttgtgtttggtcccatcgtacatactacttttgtttttttcatactaagtcaatctctcctttaaaaaatataaccataaagttcctatacacctggagcgaagctgcactgtatcactttcggctgcaactctgatctgatacactgcactgccatacctcatctccggtaaactatgaaaatatgcgttacacaattctcattttctactttacatgttcatgtgtaaataaatgatcctggcaatactcatagtttccattacattttgaacagaaacggaactccaatgtcggatcatcaagttctgtacgtccgcagactgcacaacggtgtcttgccccattcgcataagtcatgtgtggtctcgtctgctgtttaaactttgcttttctcgcctgctctttcggactgaaacgcttcatattcctgctggacaggaaaaagataacaaaattcaataaggatgccgcaatcgcaactttcgttgcgagacttcctgtaaagaaataatacagtgccattgctacatatacgaaagccatccatttcatcttaatcggtaaaataaaatagagtaaaacttccatatccggatagatggaagcaaatgccaaaaagatagacattgtaatgtagttcgtgctgatcaatccgatacttgaaagtggaagttcaattccatagataagataaaacacaccatacagtatgaatactgcgatcactgtaaaaagtattcctgaaaaaatgtatacattataacggaatgttccccaggtcctctcaagtgcagaaccaagagaatagtacaataatactagaaacagtaaagaaatcaaacttcctgttggtgggatcaatacccaggaaataatcctccagatctgtcctcttaaaatatatgccggttccagtgtaagccatcctaaaagtcccggtgctaaataataaatagcgaaacctatcacatacccggccagcagatacacggtaagattcggtattgcaaaacgacctaattttttttctaatttgtcaagccagttcaacttgtattctccttctattttcattttatattactgtccactacatgtggtcagcactcacatctttgtatagcagtaattgtacaagggaagacttgttttgtcaaacgattgtttttatattaatacacttttaacaagaatatgatattttcctttcctttctacttagacattttgccatattgaagctcatttcttcacacttactacactacaatgaccattgtctttttgagaatcttgtcgtataatgttacttattgcgagctaacaaacgcatttaataggtagtaactcatataaatttgacaaattaactgaattacaaaagattggggatattaattatgaacgcaaaaaatctacatactttaggaatcgacattggttccacaacagtaaaaattgcaattcttaatgatgaaaatgaagtcctcttctctgattatgagcgccatttcgctaatatccaggagacgctttccgatctgctcggccgtgcgctttataagcttgggccaatccaggtttctcctgtcatcacaggaagcggtggtctgacacttgccaaacatctcggtgttccatttgtccaggaggtaattgcagtctccactgcactacaggattacgctcctcagacagatgtagcaattgagcttggtggagaagatgcgaagatcatttattttgaggggggaaatgtagaacagcgtatgaatggtgtctgtgccggtggtacaggttctttcattgaccagatggcatctcttcttcagacagatgcttccggtctgaatgaatacgctaaaaattacaaagcattatactctatcgctgcgcgctgcggtgtatttgccaagacagatatccagccactgatcaatgacggtgctgctaaggaagaccttgccgcatccattttccaggctgttgtgaatcagaccatcagtggtcttgcctgtggaaaaccgatccgtggtcatgttgcatttttaggaggtccacttcatttcctctcagaattaagagaagcattcatccgcacattaaaactggatgatgaacatattatcgcaccaaatcactcacatttgtttgctgcgattggttccgcactgaattccaaaaaagatactccgatggaactgcgtgatatgcagaatcgtctcgagaataaaatccaaatggatttcgaagtggaacgtctggatccactgtttgcaacaactgctgattacgaggaatttatttcccgccatgcaaagcatcaggtgccggtaaaagatcttgcctcatacaaaggaaaagcatttcttggaatcgatgccggttcaacaactacaaaagcggctctcgttggtgaagacggaacacttctttattccttctatcacaacaacgacggggatccgcttggtacaacgatcacagcgatcaaagatatttacgatcaactccctgagggtgtagagattgttcattcctgttccacaggatacggcgaagcactgatcaaagctgctctgatgcttgatgaaggagaagttgaaactgtttctcattattatgcagcatccttctttgagccggatgtagactgtattctggacattggcggtcaggatatgaaatgtatcaaaatcaaaaatcagactgtcgacagtgttcagctgaacgaagcctgctcttccggatgcggttctttcattgagacatttgcgaaatctctgaattattctgtagaggattttgctcacgaagcactttatgcacagaacccgatcgatctcggaacacgctgtactgtatttatgaactccaaagtaaaacaggcacagaaagagggggcgtctgttgctgatatctcagccggacttgcttattctgttatcaagaatgccctgttcaaggtaatcaaagtatctgatgcatctgaacttggtaatcatattgttgttcagggaggtaccttctataataatgcagttcttcgaagctttgagaaaatcgcgaactgtgaagcgatccgcccggacattgccggaatcatgggtgcattcggtgcagctctgattgcccgtgaacgttatgttgactgcgaaggcacaacaatgctttccattgatgacatccgttcccttgaatactccacaacaatgacaaaatgtcgtggatgtacaaacaactgccgtctgacgatcaaccatttcagtggtggacgtaaattcatcacaggaaatcgctgtgagcgcggacttggaaaagagaaatcaaaaaatcagatgccgaatttatttgaatataaattgcatcgctattttgattatgaaccgctttccgaagaagaggccaaacgcggatcaatcggtattcctcgtgtgctgaatatgtacgagaactatccgttctggttcacattttttacaaaacttggattccgtgttgttctgtcaccagcttccacaagaaaggtttatgaacttggtattgaatctattccaagtgaatccgagtgttatccggcgaaactggcgcacggacatgtacagtggctgatcaatcagggagtgaaacacattttctatccgtcaatcccgtatgaacggaaagaatttgctgattctgacaaccactacaattgcccgatcgttacttcttatccggaaaacatcaagaataacatggatccgattgtcaacggagaagttgattttatccatccattcttgaattttgaaagtgaagagacgatttcttatcgtcttgtagaagaattaagtaagaagttctctctttccgaaagcgaaatcaagtcagcagtccatgacgcatggaatgaacttgctgcctgtcgtcaggatatgagaaataaaggggaagaaacaatccgtttcttaaatgaaacaggaaaccgcggtatcgtacttgccggtcgtccataccatatcgatccggaggtgaatcatggtcttcctgaattgattacatcctacaatattgcagtacttacagaagactctgtctctcatttgaatccagcagagcaccctctgaatgttatggatcagtggatgtaccactccagactgtatgctgccgcaaattatgtaaagacaacagagaatcttgatctgattcaactcaactccttcggatgtggactggatgctgttacaacagatcaggttgctgagatccttacaaattcagataagatctatacaactttgaagattgatgaagtaaataatcttggagccgcaagaatccgtgtacgctctcttctcgccgcaatccgtgtgcgtgaaaagaaacaggaaaaacgtaccattcgtccggcttctatcgaaaaggttacatttacaaaagaaatgcgtaaggattatacaattctctgtccgcagatgtctccggttcatttcgaactgcttgagcctgctttccgcgctgccggatacaacatcgatgttcttcctaacgataacaaacaggctgtcgatatgggattaaaatatgtaaataacgatgcctgctacccttctctgatcgttgtcggtcagatcatggatgcactgttatccggaaaatatgacttgaatcatacagccgttattattacacagaccggcggtggctgccgtgcttcgaactatatcggatttatccgtcgtgcacttaagaaagccggcatggagcatattccggttatctcacttaacttaagtggactggaagataatcctggattcaaactttctcctgcactggttctccgcggaatctacgcagcagtattcggagatatctttatgaaatgtgtttaccgtatgcgtccttatgaggccgtaccgggaactacagataagattcaccgcaaatgggttgaagttgttaagaagtttgtgtccgaaggatatccgtcccgtaagagatttaagaagctttgtaaagatatcatcaatgattttgataatatagagacactcgacattaagaaacctcgtgttggaatcgttggagaaatccttgttaaattccttccggctgccaacaatcatctggcagagcttttggaaagtgaaggcgccgaagcagttgttccggatcttctcgacttcctgctctactgcttctacaatcagaacttcaaagtttctcatctgggaatgaagaagtccaaagcaacagcaggaaatcttggaatcaaagctctggaatggttccgtgctccggcttccaaagcatttgcagaaagtaaacactttgatccgccggctcacattgaagatcttgcaaaaatggcttcagagatcgtatctctcggaaaccagaccggtgaaggatggttcctgaccggtgagatgctcgaactcattcacagcggtgccggaaatattgtctgcacccagccattcgcctgcctgccaaaccatgttgtaggtaagggagttatcaaagaactccgccgcagacaccctgaatccaacatcgtagcaattgacttcgatccgggcgcaagtgaagtaaatcagttgaatcgtatcaaactgatgctgtcaacggcgtttaaaaatctcgaaaaataaagatttggcgtagagattctttttcgagtccggacgaaaacagagaatatgattttagatagttgattgttagaaggtgggtataggaacgccgactcagggttacgcatactgttcatactaagaaaaacaatagactgctaaaagcaaagaaaggattgacaaactcgctgccgctcagacagctgtcaatcctttctttgacgcaatctattgtttttcaagtatgagcaagcatgcttcacattcgtctgcgtccctatacccaccttctaacataaagctcctcgaagctcatattttctgttttctgtttattaaaaaatcgattccaacgctaaattttattaggtgcaaaaacgtttgagatatggatatcattctatagaatttccgttgcgcctacctctcaagtagagttcttctttcgaggaagtagaaatctgatatcgctgaaaacttaccgatagacaaacatcgagggtttgattcaggtgactgttctgtgtgcttggaaagacttaaaaaacggaaggttacgttaaagcagtgtgaggctactgcttgaagcggcagcgagtttgccgaacactgctttgttcttagtaacctttcgtttttcttagcctttcctgtatacagaacccggagcctgcatcaaaccctcgatgtctgtctattcgaataaactttatatgcgatatctgatttcgtccgaactcgaaaaagaatccctacgataaatctttatttacgatacaagtaaaggattcccccgaaaaggcccaggaaaattcctgcgtatcctcctgcacagaggatatctgccagactctgtatcagatctatcctgattgcagaacatacccctaatccaaacagtgttccaatgattgtccatcctacaattaaaattggcagatatactgcaagtgcatgatctgcatctatataatgatttacaaaactccaaagttttccatacataaaaattaccctctttctactaaaaatgtctaagtgtttttccttttgacaattcttagtatagagggtatttgtaaagtctcattttcttccaatgctaaatctatgtaaaataaatcaaactattgttaaatcgatttactttattcggtttccagaaccagttcggccacttcctgtggtgttgttgccagagcatctgcacctgcctctgagagttcttttaaatctccgtatccatacagaacaccgatcactttcagcccttccgcatggcctcctagtatgtcataagaacgatctccgaccattacgattttatccagttctttctcttcgcactgttccaagacataacggataacatcttgtttttctgtacgtgtctcatccatacatgccccgccgatcacatcaaaatattgagccagttcaaagtgatctgcgatgattttagcaaatttttccggcttggatgtcgccatcgcaatcttgattcccgcttgtttcaatgtcttgagcatctcttctacgccatcatacacactgttttcaaaaatacctgtcactgtgaaatattctcgataaagagtaaccatctctgctgctttttcttcatcaattccacagtgttccataaactgacccttcagcggtggtccaataaatttacgtaattcatctacgtcaggtgtcggttctcccaccttctccagcgcatattttacggaattcataattccaggacccgaatctgtaagtgttccgtccaggtcaaacagtacagttgttattttcatttccaattcctcactctgttaaaattttctaatttgatcatcctcttcactttctgttttaatcactttacggatcaccacataatagccgaaatcatcgttcactttaatatagactctctcgccttctttatgtccgagcagggcttttccaatcggagattctatgctgaccagtccgttcaaagagcttcctcttacagaagttacaatgcgatatgtctcgatctcatcatcgtcttcacaataaagctctacggtattattcaggccaatttcatcctctttcgaatgatcttccacaatctcagctgtcttgagcattctttccagataacgaatgcggctttcgttctgattttttgcttttttcgctgcatggtattcaaagttctcgcttaaatctccatgagatcttgcttctttcactgcttcgatcaattctttacgttctactaattttcgatgctcaatctctgcctgaatcttttctacatcattttttgtcaatctttcacgcatgacttttcctttcctctctgaaccatagacattgctgtacacatctactgcgaacaacaacctatagggaaaaggaaagctatcaattacgataaactaaaacaagcactgttgttatcgcagtcaatagctttcccttttcacttctatcttaatccacgcaattttcttctagattcttttctcttgaaagaatcattcaagttgcctgaatccaaattcaacacttatgaattatttcactaacagagattttcctgtcatctcagccggctgctgcattcccatcagctcgatcagtgtcggagcgatgtctgccaggcatccgccttctcttaatttgtaagccggatcagcatttacaaggataaacggtaccggatttgttgtatgagctgtgaatggctcacctgtctcctcgtcgatcagctgctctgcatttccgtggtcagcgcagatgaacatctgtccgtctacttctttcagagcctctacagcctttcctacacactcgtcaactgcttctacagccttgatcgcagcttcctgaacacctgtatgtcctaccatgtcagggtttgcaaagttgatcacgatcacatcatagttctcagacttgatcgctccaacaagcttgtcacatacttcgtaagcactcatctccggtttcaggtcataagtagcaaccttaggggatttcacaaggattctgtcctctccctcattcggctcttctaccccaccattgaagaagaatgttacgtgagcatatttctctgtctctgcaatacgagcctgtttcagtccgttatctgcaaggaactgtccaaatgtattcgtaatagattcttttacgaatgcaaccatcttattctcgattgtcgcatcatactctgtgaagcatacgaatgtagtcttcactctgtctcctctttcaaatccgtcaaaactgtcatcacagaatgttcttgtgagctctcttgctctgtcaggacggaagttaaagaatacaacagaatcattttctttgattgttgctgttgcagcaccgtcttttgttacaacaaatggtactacgaactcgtctgttacatcctcatcgtaggaagcctggattcctgctgttgcggattctgctgtattgccttctcctgcaactaatgctttgtaagctttctccacacgatcccaacggttatcacgatccattgcatagtaacgtccggatacagatgcaacttcacctacaccaatctctttcatctttgcttcaagctgctctacatactctttacctgatgccggtggtgtatcacggccgtcaaggaaacaatgaacatatactttctcgattccctgtctcttggcgagctcaagaattccataaatatgagtaatatgactatgaactcctccgtcagatacaagtcccatcaggtgaagtgcagaattgttcttctttacattctcacaagctgcaagaagagctttgttctcaaagaaatctccgtcttcgatagactttgtgatctttgtaagttcctgataaatgatacgtccggcacccatattcatatgtcctacttctgagttacccatctgtccatccggaagacctacagaaagtccgcttgcatttccttttacaaacggatactctgccatcagtttatccataacaggagtattcgcaagtgctactgcattaccctctgtcttatctcttaatccatatccatctaaaatcatcaatacggttggttttttgctcatctcaatatctcctttgcattaagattgtctattttttaactctacgctttattgtactagttttagcacaattttgcaagtcagagctctggtcaaatatatccgaaaataagcagattttcgcctgaattcatgtaaaaatcactacattaaaaatcttataatgtcggaagcaattctttcatcagctttacaccatgaacgatcgcctgtttctcaaatgtaggataatccacctgggcacttccatctgccttatctgagattgcacgaatgatcacacatggaacatgattcaaatatgcaccgtgagcaattgctgctccttccatctcagcacatttcgcaccaaaattattaacaatacgttcttttacttctttttcagaaataaactggtctccgcttgcaactcttcctgtaaatgtacgaatatctgaattcgcctttttatttgcttccactgcttttctcacaagttctttatctgccggaaatgcaaatacatccatacgcggcacctgtccgacaggatctcccaatgcactgacatccatatcatgctctactgcatctgtagatacaacaatatctccgatattgatctctgcatccagagaaccggctacacctgtattgatcagctgatccacctgataaaagtctataaggatctgtgtacagattccagcgttcactttaccgattccgctctgtacaacaactgcttcttttccataaagctgacctttataaaatttcatggatgccttttcctgcatctcgcattctgtcatatcctcgatcagctcacggacttcttcttccatcgctccgataattcctaccatagcttcttaatctcctatcttttatattcccttttcttaattgctttattttcttcattaagctgttacattattttatcaatctcctctatgatacactcaaatgattttcaaagtcaagaaaaaaggccatcctgtcagaattgctatctatatcgctactgtctgcactacctgtgcccggcaatataaatatctttctgaccagatgacctttcttaattatctgttataatgaaacagccttagatcttattatttgtagttaacgatctttccgaagtcagccttaagggaagctccacctacaagacctccatcgatgtcagcctgtgcaaaaagctcaggagctgtagctgcgtttacagatccgccgtactggatacggattgcttctgctgtagcttcatcatatacttcagcgatgcatgcacggattcctgcacaaacttcttcagcctgctctgttgtagctgtctttcctgttccgattgcccagattggctcgtaagcgataactgctgtcttagcctgatctgctgtaacaccctggaatccaaccttaacctgctgacggatgaagtccattgttacgccctgctctctctgctcaagagtttctccacagcacatgattggtgtaataccatgctcaaatgctttcaggattttcttatttacatcttcgtttgtctcaccgaagtactctcttctctcagaatgtccgagaactacatatttaacacctgcatctacaagcatattcggggaaatctcacctgtgtaagctccgctctcctcaaaatacatgttctcagctccaacctggatgtttgttcccttagcagcctctacaactggtacaatatcaatagccggtacgcagaatacgacatctacgtcttcgttagctacgagtggttttaactcttctacaagcgcaactgcctcgcttggagttttgttcattttccagtttcctgcaataattttctttcttgccattgttcttatctccttgaattttatattcagaacccgtgtgaaatgtaacaacacgggtttcttctgatctgtaattacagattcttattatttatcgttagctgccgctactcccggaagttcttttccttcgaggaattcaagagaagctccaccacctgtagagatatgtgtcatcttgtcaccatatccaagctggttaacagctgctgcagaatctccaccaccgatgattgttacagcatctgtgttggcaagtgcttctgctactgcctttgttccttcagcgaatttcggcatctcgaagcatcccattggtccgttccatacaactgtcttcgcagatttaacagcatcagcgaacatctcagctgtcttaggtccgatatcaagacccatccatccgtccgggatctcgttctgagctacaacttttgtatttgcatcgttagagaaagcatctgctgcaacagcatctactggaagaagaagtttaacacctttctcctctgctttcttaaccatgtcaagtgcatactgtaagtaatcttcctcaagaagggaatttcctacattaccgccctgagcttttgtaaatgtatagcacattccgccaccaatgatcagtgtgtcaactttgtcaagaaggttgttgattacagaaatcttgctggaaactttggatccaccaaggatagcaacaaatggtctctccggattctctactgcatttccaaggaaatcgatttctttctgcattaagtatccaacaacagctgtgtcaacgaactgtgtaacacctacgttagagcagtgtgctctgtgggctgttccgaatgcatcgtttacaaatacatcacaaagagatgcaagatctttgctgaatgcttcaccattctttgtctcttctgctctgtaacgtgtattttcaagaaggataacatctccatctttcatagcttcaacagctgcttttgcgtttggtccaactacttccggatcagctgcaaatttaacttcctgtccgaggagctcagaaagtcttactgctactggtgcaagtgaaagctccggctttggctctcccttcggttttccaaggtgggaacaaaggattacttttcctccatcagcgatcagcttcttgattgtaggaagagctgccacgatacggttctcatctgtgatctttccatcctgaagcggtacgttgaagtcacatcttacaagaactctttttccttttacattgatatcatctacggattttttattaagtgctgccatttttcatagcctcctgtatttctatttcctgtcactttcacgtgcagaatctgttctgcacaaagaaaatggggtccggtcctacaataagaccggaccccattgtgagtcaataattcagataaatctctgagattctaattcctcaaaaagaattaagcctcaagaagttttccaaagtatttgattgttcttaccatctggcttgtgtaagagttctcgttgtcataccatgaaacaacctgaacctctgttgtaccatcgccaactggaagagccattgtctgagtagcatcaaacagtgaaccatatctcattcctacgatatcgctggatacgatctgatctgtgttgtatccgaaggactcgttggaagcagccttcatagcctcgttgatctgatcaactgtaacttctccgtcaactactgctgtaaggattgttgtagaacctgttggtgtaggaacacgctgagcagatccgatcagttttccgttcagttctgggataacaagaccgattgctttagcagcacctgtgctgtttggtacgatgttaactgcagctgcacgagatcttctaagatcaccttttctctgcggtccatcaagtgtcatctgatctcctgtgtaagcgtggattgtacacatgataccggacttgattgctgcaaggtcgttaagagcttttgccatcggagccaggcagtttgttgtacaagaagctgcggagatgatgttctcatcttttgaaagtgtctcgtggtttacattgtaaacgattgtcggaaggtcatttccagctggagcagaaataactactttcttagcacctgcatcgatgtgagcctgagcttttgctttggatgtgtagaatcctgtacactccagaacaacgtcaacaccgatttctccccaaggaagctcagctgcgttagcttttgcgtagatcttgatctcttttccgtcaactgtgatggaatcctctcctgcttctactgtgtctgcaagagcgtatgttccctgagttgagtcatattttaataagtgagcaagcatcttaggagatgtaaggtcgttgattgctactacctcatatccttctgctccgaacatctgtctgaaagcaagacgtccgatacgtccaaaaccattaatcgctacttttactgccatgattaattcctcctaaaagttttaaaaaatttatgactgtatctccagccatggcgatgaatttaacaaagcgataattgttaaatattcatcaactagattcattgtactaaaacaggaacaaaaattcaacccttaaatccatataattcgatttttatggaacaattctcttaaatatcggtttccgccccttaaattctgcataataactaaaaccacagcttataagtatctcgccagccttgtcaaagtcaaaagcgacatgttccggacggtgtgcatctgcaccaattgtgacaatttcaccaccaagctccttgtatcttctgataacatccggatgtggattcgggaatccgagaccatatttcattcctgccatattcatctcaagtccttttccatgactgatcagatgctttagtatctcatcgatctcgtctgcatattttctataagaatatccttctgcctgatgtgcgccataacggacaacatagtccaaatgtcccaaactatcaaaggaatctatttttttcagattttcaactgtcacctcaaatgcttcatgataagcctcttcatcacttcgtccttcaaaaaatccacgataatacggatcctgtccatggataagatgtactgaaccgatcacaaaatcaaacggatatttttctgtcagttctttataatattctcccaggtgtggctgaagtccgatctctacaccgattcggacttccagtttcttctgatattctgtttttaattgcgtcagtctactgaaatattcatctaggtcgaacataaatgcacccgccggaaaatccggtgtttctggaaagtctttatcaagatgatccgtgatgcagactgcctgcattcctttattcaccgctgcatcaagcatggagtgcactgaagaatcactgtcttctgaaaatcttgtatgcatatgagcatcacatgttatcataatattgtaccgcctcctaatacatactcaccatcataaagaacaactgcctgtcccggtgtcactgcacggattggttcatcgaatgtacaggtaatctcatcttctcctgtcttctccacggtacaccaggctcctttgtggttataacgaatctttgcaaacacacgcatcggttctgtaagatcttccacgctcataaaattcaactcattggcacgcagtgtatgcgtcaatgattcttcatacgttccgattacaacttcatctgtctccggacgtatctccagtacaaatgcaggataccctaatgcaagcccaagtcctttacgctgtcctactgtataatgaatgattcctttgtgttttccaaggatcttcccatccggtgtcacgaaatttccctgacgaatcggagcatctgcgttttcttcaataaaagatgcatagtctccatccggaacaaaacagatatcctgactatccggtttatttgccacctgcagtccgattttttctgccatctcacggatctgatcttttgaataatttccaaccggcatcaatgtatgttccagctgttcctgtgtcagattataaagtgcataagtctggtctttcgcaagcgttgcagatctgcggattgcatatcttccgttcgggagcttatcaatccttgcataatgtcctgttgcaatataatctgctccaattgaaagacttctctgcaaaagagcttcccatttcacatagcggttacaggcaatacatggatttggtgttcttccgttgagatactcttctgtaaagtaatcaataacatttttctgaaattcctgtttaaagttcattacataataaggaattcctatagacaccgcaacccgtcttgcatcatccactgcactgagcccgcagcagcctccattctcttcctgaacgacgttgtcttcatcctgccagatctgcatcgtcacaccgatcacatcatagccctgctcttttaaaagccaggctgccacagaggagtcaactcctccggacatacctacaacaactttgcctttgctcattaatattcctcttcctctgcttcttcaccttcgtgaatatctgactttggtttcttcaggccttcaatcttaatcccatgtttctctgcataatcccagagtgctgcatggattgcctcttctgcaagcagagagcagtgaacttttaccggcggaagtccgtcaagtgcttccataactgctttgttcgttacttccattgcttcctgaacactcttcccctttaccatctcagtagccatactggatgttgcaacagctgctccacatccgaatgttttgaatttcacatcgcggatgatctggttgtcatcaatgtcaagatagattctcatgatatctccacattttgcatttccaactgttcctacaccgctggcgttctcaatctctcctacatttcttggatgctgaaaatgatccattactttctctgtatacataatgtaattcctccattttgtttatcttttattcaaaaattattctgtattttccttttaaatcattctgacttatgcattcttctgctgcttttttataaaatcttcgtagagcggtgacatgctgcgcagatgggcaacaatctctttaagctgatctactgtatagtcgatatcttcttttgttgtatcagctccaagtgtcatacgaagggaaccatgtgcgatctcatgcggcagtccgattgcaagaaggacatgggatggatccagagaacctgatgtgcaggcggaaccactggaagcacagattcctttcatatccagcatgatcagcaaagattctccttcaacaaattggaagctgaagttaatgttattcggaacacgtttcacacgatctccatttaatctacaatatggaatctcattctcaattcttgcaattgcataatcacgaagttctgtctcatgtttcattctctgttccatggaagccatagcaagctctacagcttttccgtatcctacaatacccggaacattctctgtacctgcacggcgttttctctcctgggctccgccgtgaataaatgaacggatcttcactccttttctgatataaaggaatccgattcctttcggtccgttcagtttatgtccgctggaactgagcatatcgatattcatctcatctacattgatcggtacctgaccaaacgcctggacagcatctgtatggaaaagtactccatgtttatgtgcaatctctccgatttctttgattggctgaatacttccgatctcattgtttgcaaacattacgctgaccagaattgtatccggacgaatcgctgcttcaacagcttccggactgacaataccattctcatctacatccagataagtcacttcatatcctctcttctggagatattctcctgtatgaaggattgcatgatgttcaatctttgttgtaatgatatgttttccctttgattcataagcctcagctgtagctttcagcgcccagttatcagattcagaaccaccagctgtaaaataaatctcctctgtcttcgcaccaagtgcttttgctatgatttctctctgttttgtgatcacttctttattcgcagccgcaaaaccataaacactggatgggttgccaaaatgctctgtaaaatatgggagcatcgcatccacaacttccggtgctgtctttgttgttgctgcattatcaagataaattaattttcccattacctgttacctcacttttattttatctgctttgttttcttaccgttcacaaataattgtagacaatgattcttttcagtttttacactttgtataatccagatgattgtccgtatgtccaagacatttactttctgtcaccagttggttcagccagatttcatctactgtctggttaatactatcattgattcgtttccacacatactttgttacacagctgtccgcacctttgcattctccttccggatcaagtccggcgcattctactggttcaagatttccttccagtgcacgaagcacatctcctacagaaatatctttcgcttcctttgctaagacatatccaccatttgcacctcggatactcttgacaagtcctgcttttttcagcttcgacatcaattgttccagatatcgttctgaaatatcctgacgtcttgcaatacttgtgatggaaaccggagaatcttcactgtattgggccagatcaatcaaggcacgcaatccgtatttcccctttgttgacagtttcacatcttcaccttctttttcttttcctttttcctagtattatactagggtttccttttgtaggatatcaccagtcttacgttctgtcaaggatgtttcttgaatatgttgtttaaaaataagttcatttctggttactgtccgcgttgcacgtggcagcaatcattttgacatgagggtattatgtttagaaaaaaacattctttgattaaaggaacactgattctcacatctgccggtcttgtaagccgcgttctcggattctttttccgtattttcttaagccatacctttggagaagaacaggtcggactttatcagttaattttccctttctacgcactctgcctgtctttgagtacttcaggtcttgaaactgccatttccagaagtgtctctcgctttcactcccttggccgaacgcaggacggaaagttgattttccagacaggtctgattctttctgttctgatttctctgatttgtacttttctggtacagaagaattccgtttttctttcaaatcgttttcttggagatccaagatgtgcaacactattatatctgatcgttcttgcacttccggcagcttctgtccacagttgtatctgtggttatcactatggtctgcaaagaacctctgtcccggctatttcacagttaatcgagcaatttgttcgaatttcttctgtttttgttttatattttatttttatacaccgtggagttcaccctaagattccattggctatatcaggtattattttcggagaacttgcagcagcaggctactcgcttttttcactgaagaagaagggttttgatgccaattctccatatattctttctatctcaaaatcttgttctgaattgctacgcctctctgttccattgacagttaatcgcacagcaattacattcttgcagggaattgaagcagcttcaatccctgtctgccttgagcttgcatctcacagtgcttctgaagctctcagtatttatggggtactgaccggaatggcattaccatgtatcctttttccctgtgcactcactaactcaatcagcctgcttttaattccagcagtcgcacaaaagcaggctgaaagctcttcaaaagagacatttctccttataaaaaaggctgccggaggatgtttctcccttggtcttctgtgttctgtcttctttcttcttaccgggtcttttctcggaaacttcctgtttcacagtactttagccggtaatttcatcgtaacacttgcctggatctgccctttcctgtacacaagttccgctcttctcagtgcaatcaacggactgggacttacaaccctgacactgatgatcaatcttcttggattatccatccgcattcttagtgtatatttcggaatcccgcactatggaatcacaggatacctatggggacttttcatcagtcaatcaactgtctgcctcgttgcattactcacactttcccacgaaatcaaaaaagaatatttacaatctgttgaatcagccacggattaagacaggattctgaaaaaatcccaattaaaaacaaaccgcatacaaagaacgttttttgtctgttccactgattctgtggatagttccaacaaaagcgcaaaagcacaagaactgccggaacataaaaaaggaactgtggaaatagtcctgccacacaaagaatacttcccttcattcctaattctgccactgcctctgacagtaaaattcctcctgacatcccagtccacagaagaaaaaacgctgccacaatttttctaatccggattcccatcgccaaaaacagcaccaggaaaaaaattccccgtacctgaatcaaataccaaatgtactgttgaaaagatatcttctcattctttaatctcataagataaacttctgtaaaagttccgatcaggctcagctgttctccccatatataattgacaatcaagattcctgtcaaaaagcctgtaaaaaacagagccagaaagtaatgacctgtacgaaatgccttcaccagtattcctcccaccctataaaatgttctgcggatatatttttatcctcaatcttccacaccattatatgagtgtctggtttttctcatgcggcagcgatgctacttattgtcggcattcaatcattttccatactttacagcataagccatcaaagaagaaactgtcttcgcatcttcaatctcacctgaaaagatcttttccttcaattcttctattgtataagcgccaagttcaataaattcatcttcatccaaatgctgttttgacggtatcagatcatgtgccacataaacttcaatccgttcgttacaaaatgctactgttgtccgtaaagtgatcagccactccagattctcgctgcgataccctgtctcttcctctaattcgcgagacgcacactctataccaggttctcccacttcatcaagtgctcctgccggaatctccaatgtatatcgatccagcgcatttctatactgtctcaccatcaaaatcttaccatctgctgtaaccggaactaccgctgctgctcctttatgacctataaaatcccatactacggtatgatccccgtccacttctatcgtgtcctgataaaaatcaagaatctttcctttaaatttcaattctctgttaattcttttaatcttctcgctcattccgttctcccttcttttaccttacatcaccgtatgcattctatatcaaagactttgttactgttcacacgatgtgcgaccagcaacgcatctcgccattttaaatcgcctttggcgatggggcgagatgcattcaagtcaaaacacgcatcctccacgtcaatcagcggagtgattgacacgggagtgaacagtaacaagaattttacgcttacctgtaatagctttctcagtaaactaaaagcccctgtctttcgacaagggccaactttcatcttctgttatgattctcttattttgcgtaatctgttgctcgtgactcacgaataacatttactttaatctgtccaggatattctaattcaaactcaatctgttttgcaatatcccttgctaaaagcaccatatcatcgtcagatacctgctccggaactaccataacacgaatctctctacctgcctgaatggcaaaagacttatctacacctttaaactggttggtaatatcttctaactgtttcaatctgtttgtatatgtctcgatggtttctcttcttgctcccggtcttgcagctgaaatagtatccgctgcctgaacaacacaagcaatcagactctgcggctccacatcaccatgatgtgcctccacagcattaataatggttgctgattctttgtattttctacaaagatctgaaccaatctgaatatgtgatccttctacgtcatgatcaattgatttaccaatatcatgaagaagtcctgcacgttttgcaagtctgacatccagtccgatttcacctgcaataagaccggataactgggccacttcgattgaatgcttcaatgcattctgtccatagcttgttctgaacttcatacgtccaagaagacggatcaactccggatgaattcctgtaactccaacgtcaagagccgcagcttctccttcctcgcggatcattgtatccacttctttctgagctttttcaaccatctcctcaattcttgccggatgaatacgtccatccacgatcagacgctcaagtgcaattcttgcaacttctcggcggattgggtcaaaccctgataatacaaccgcttccggagtatcatcaatgatcagttccacaccagttaatgtttccagtgttctgatatttcttccttctctaccgataattcttcctttcatctcatcacttggaagctgaactacagaaattgtagtctctgcaacatgatctgctgcacatctctgaattgcattcacaacatactcttttgctttcttgtcagcctcttcctttgcctgagtttccagttctctgaccatcttggctgtgtcatgcttgacgtcatcttcaacagtttttaacagatattcttttgcctgttcggaggtaagtcctgagattcgttccagttcctgcacacgtttctggctaagttcttctactttggcttcacgctggcgaagatgttcttccttcgctgtcagtttgctctcacgatgttccagtacatctgaccgtttgtcgaccgattcttccttcgcgagtacacgcttctcataacgctgtaactccgctcttctttctttcgtctctttctcgagttcattctttgtcctgatggactcttcctttacttccaaaagagattccttcttcgtcgtctctgcagtctttacagcatcgtcaatgatttctcttgcttttgcttctgcattcccaatcttgctttccgcattctttctcagattggaaactgtaacaaagtgagtaatgattccgactatcaacgcgagggccacggcaacgcctataaataaacctagacttatctgcacaggagcacctccttattcgattttcattgtacatattactcaaatacaacacttaaattttatactgtttcaacaacaatgtcaagcattgtaattattattttgtatcacatgacataacccggttactgttcacacgatgtgcgaccagcaacgcatctcgccattttaaatcgcctttggcgatggggcgagatgcattcaagtcaaaacacgcatcctccgtgtcaattagcgaagtgattgacacgggagtgtacagttactctgtttatcataatctgatataacatggcggatcacctcataacgaaatccttttcgcgcaagatatcctaatatcttttgatattcctgctcttccattctttccggatcaaccttcttttttcgcagtatccttcggattgcctcttcctcagaatcttcactatagcactgttcaaaagccaggcagatcaaatcatcagaaactcccttctgcgacagcagtgccttgatttcccgtttgcttttagtatctttgcggctcataacaaaattttccgcatatcttgcatcatccagatatccaaaagatctcacatattcaattgctccgctgattgcattctccggatattgtcccgccttcagtttttcccttaatgcagactcagtacgatccatatcctccagcaaatgcattgctctcttctttgcgcgtttcaacagtacctcattctgaatcttttcataattttcctgcgcgagatcttctccctgctttataccaaaacgcttcaactcacctttataaagcacaaatgcaaatgttccatccagatatactttaaacttcgtctttgtctgctcttctatcccagtaacaatcattctttcttttctgcctcatcagccactttagaagccggtgtcagcttcagatcacttgatgcccctgtcttcttctcagcatctggaagctcattctctgcttcttctgatccggataatgcataatgtgctctcaccttctgatccagtgtctccatcacttccggatgtgattccagatatgcctttgcattctctcttccctggccaatcttctctccctcatatgcataccacgcaccgctcttcttcacaagatcaatattggttgcgagatcaagaatatctcctgcacgggaaataccttttccaaacataatatcaaattccgcttctttgaacggcggagcaatcttattcttcacaatacggattcttgtacggtttcctaccatctctccactctgctttaaagtctcgattcttctgacatccatacgcacagatgcatagaatttcagcgcacgtcctcctgtcgttgtctctggatttccaaacattactccaactttctcacgcagctggttaataaagatcacaatacagtttgacttgctgataaccggtgtcagttttctcaatgcctgtgacatcaatcttgcctgcagaccaacatgactgtctcccatatccccttcgatctcctgctttggaacaagtgcagctacagagtcaatgacaataatatcaatcgcccctgaacgtaccattgtctctgcaatctcaagggcctgatctccactgtcaggctgtgaaatatagagttcatcgatatctactccgatattctttgcgtatacaggatccagtgcatgctctgcatcgataaatccggcaattccgcctctcttctgaacctcagaaatcatatgaagtgcgacagttgtcttaccacttgattcaggaccataaacctcaatcacacgtccctttggcacaccgccaagtccaagtgccagatcaaggctcagacatccggtaggaactgtctctacagctacatgcgcccctgattctcccagccgcatcactgcacccttaccaaaatctttctccagctttgcgatcgctgcatccagtgctttcttcttctcttcgttattcgccagctttgtaacgctctctttgcctgccataattttctccttctctatctctcttagtgtataaaacccattctctcttttttcgaacagttgttcgtctatgaatagattttattatacttctttcaaaatgtcaacaataattcttccccttaattttgttgcaataatacgatataccatggaatcctcttcctgaaacagaagcattgaagttcatgtgaatcagtgccggcttaaggatctgccggccagacaactaaagaatagcataaggaaaggcagaatgcaagtaccacagcacttacattctgccttttatactacactgctttccagtgtttcacttcttctttgtaaaagataattccttcctggataattttgaatccactgccttcaagttccgcaatcgtaacagaacaatttggcggtacttcatttttccagaaatgttctactgaaagactgcctctcatcctgttcagcattgctgtcatcgcagcaccatgagtagaaattagaagattcttattcttcagcttcttactctcttcaagactctttaaaaactctccggttctttcataaagttgttctacactttcagcatcttccggaggaatataatttcccgtatcctgaaagaatttctgaaatgcaagattctcttctttcgtcttatctacacaagacattccctcatacgagccaaaagaaatttcctggattctctgatcttcataaagcggaatgttgcgtccttcaagaagaatctctgccgtttcttttgcacgccgtaagggacttgtataagccagatcaatctggtattgtctcatcccataagaagtttcccgggcaagatgacgcccatattcatttaagggaatatcctttcgtccctgtaccagttttttcttgttccaatccgtctctccatgacgcacaatatatagcctcactgctgcctacactccctcttcttatctttttaatacttctctcctgatatatctgtaagtagtttcctcgccttcttccgcaagcatatgaagcagtttttctaataattctcttgtatctttatgcatcagctcatctgcacgtccgttttcataataagcaagcggtgcatcagaggtatatgcatccccgagatacactttacttgctgcaatgcggtcaagaaacatctctactacatatttcaccggcatcttcattcccgccagaaggttcggtccctccagactataatcaatccagtattcataatggtgtttgttcctgcctttgtggtggagccatgcggaagaataccccttttcttcccgttcggcattattagggcttcttgtcccctgatagtatctgcatcccacacggaattctgtccaactgtattttgacatatcatggagcagtccctgtttgtacaacccaacacgaaaacactctttcaataccagttttttgtgttttgttatggtacaaaaatgtgcaaatgccttcatacttttccctctctggccggctgttcttctttacaaagttcttctgctccctgccgtttttctattttatttacattctgcgtcttagctgtatgaatcggtttcttttctgaacgactcttcttttcctctatcctgcgtccaaccagaattgctacgctacgttcttccagtaatacatctttctgattttccagctttttcgcttcacaaagcacgccatcttttgtagccataacaagataccattctacgttctttccaattgatggtattgcgaagtgatgcggcagccaatgcatattatacgctgtaaaacaaggaaactccccttctttcgttcctgaatacaagacacctaactgacggctggaaacttctgcttttacctgccatgcattttctccatggtaggatacgtccggtatgccacatctcgtggtatccattccggatagtgctgtactctggtggagacaacgatgttcttttctcagcccgatcagtttctttgtatactgaaacagccagtcatctttcttcaactgtgtccagttcacccatcctgtctcgttatcctgacaatatgcattgttatttcctctctgcgaattacagaattcatcccctgcaagaaggcatggagttccctgagccgtcaacaggagttctaatgcattcttcacctgattctttctaagattgacaactgcgcgttttctgctcggtccttcagctccgcagttccaactgtaattataatctggtccatccaggttcttctcaccgttttcttcgttatgtttacaatcataagacactaaatcccataacgtaaatcctgtctgtgttgtaatataattgcattttccattttccgatgaacgatttttcaatgcccagatgacatcattgaccatattctcgtcaccttttaagaagcgacgcatcacattctggaaaccatcatctttctgcatcagcttgatatctttcaaaaacggatcttctatcagctgttcccacggtacgttataaggattcagaacaaatccatccacatgatactccagcatataaaagcgtagacattccgttacataatttgctgatattcccggaataaatggcatctccagtacaacttctatgccctgactatgacatgctcgcaccatatctttcaactcacgaactgcacttttcccatatgcataggcttttttaggggcaaaataaaaacctttaccatatccccaatagttcacttttgtttttccgcactcttcaaattcatagaccggcatacactgaatctggttgactccaagttcttttaaataatccagtttttcaacaaccccctgaaatgttcccttatgcaccactttcgaagaagaatgttttgtaaatccacgcacatgcaaaccataagccactacatcttcccatggaagatgtaggcgctgatcctcctgccagtcatagtcctccattgaaacaattttcccacgaatctgatgttcctgaagttttcgttctacaccaaatttctcttttcctgcaagttcttttacatatggatccacacatactttcccatcaatcagaaaattgtattcatatcgatctgctttcagaccttcaacagataagaaacgtacttctccaacgccttcttcctctggcatatcaaactgatattccggaacatctttccctctcttatacagtaaaagttcacatgtcttcccttttgctacctgaacggcaaaatttatatttttgcctttgatatccactccaaatggctgcggactcccctttatcttcctcatagttaacccctttcttgagcaatcaataaattactgccatccatctgttccgtacatttcaacattatcacgatttataaagaaagtttcctcataattatccttctcgtaatccttgtctgccagtaatgctgtcgccacctttactgctgtctttcccatattgatcggggactgtgctccaatcccggtcattcctccagtgccattcaccagtgctgtttttgtcgccggggaaccatccacactatacacgcagatattcgttctctgcgcttctgtgattgctgccatcacctgttctgccataggatcactaccacacattacagcatcaatctcactattttcgctcagaacctgtgtcatctcgtccttcacattgctactgtctcccaatgcttcaattctctttaccacttcaaacccactgtttgttatagcctcttcaaatccggtaattctctcattcactgagttcaccccagggctttccacaatcacaattttgccgccatctggtttctggacctgaagatcctgcccgcacacatatcccgcattctcattatctgaccctacaaatgcagatacaaggcttgtctcttttacttctgtatcaagattgatcaccggaatatctgcctcttttaaggcttcaagtgcgggagtgattttctcccaatctaccggacaaagaaatactgcctgtaccccttcgttgatcaactcccgaatctgttcattctgcaaatcagcatctgatgccggatcacgaaccatcagacggtcaccttgagcctctaatgctgtctggacagaatttttcaatgtgtcataaaaaggattcgacatatcaatcccactaaatccaaacagtctgccaccttcccctgtattatcatttttcttatcatcctcttctactactgcattatcttccggtgttccaacatttttctttccacatccaagcagtgctgccgctatacacaaaactgccactgtacacagtatccatcttttcttcatattgtctattatcctttcacttctatcagtaacacttttattctaccttgtttaacccgaaagtcaatcttatcttgcttttttctcccctttttgttaccatcaagatagctgatcattctcgttttgagcacctggctggtcaatacggaatgaaatacaacacagattcaaaggagaagattatgaacgaaaacgaatccctcacagtcactttgacactggagaataatgaggaacttgaatgcgctgttctcaatatttttgaagcagatgaaaaggagtatatcgcacttcttccactggatgaaaacggtgataacacagacggtcagatctatctgtatcgtttcattgataacggagaagaggaagaacctggacttgagaacatcgaagaagatgaagagttcgaccgtgtttccgctatattcaacgaatggctggatacacaggatttcggcgatatcgatcttgatgcattagatgacctggaggactaagtcttgaggatgtcagcaaagtgactgacatccggtcagcttttcaatagttcgtctacaaaacgggaaggagtaacttctttcccgttttttattttcacataacagatcttcagaaaatcttttgcccttgtcattgccacatagaataatcttctctcttcttcgatctccttgtctgtctttgccttctgatacggaatccttccttcattcgccgcaatcagaaatacctgcttgaattccagtcctttagaagcatgtatcgtcatcagccggacacccggacgtggtctgtttctttccttttccttcactttcaaagtctccgtatattcttctacatgtgcaaaccattcttcaacacttgaaaatgctttcgccgcctcttcgatctctgccagtacttcattcagatcagatctgtttatctgatgtgtaaatgcatactctttcagaaaatcgtcataaccaatcctttttctgatatactggattgccgcatatggagccatcttcataagcatcttaacatcccactcaaactgatcaatccggtcgatcatccagtctttatcacaatagaacttccgcatgtcttcaaaagaaaccttcgctcctgctacactgtctcttccaagatatcgctttggtcggttcattatctgtaaaaaatcttgtctgtgccgagctcctgttgccagtcggaaatatgccatgatgtcctttgcgataaagtgttcatatatatttggaagatgttctttcatctgaaacgggatcttccgctccaccattgcttctaccactgctcgcgcatctgtatgaaccctgaatagaatcgcaatctcctcttcttttatgccattctccttacatttctgtatctcttcaagaacatattctgcctcttccaccggatctttcacttcctgaatatgaaggcaggaaccgccttcacggtttgcttccaattttttactgtatctctccacattattttcaatcagtttcaaagaattctgtacgatatttgctgtcgaacggtaattcattcccaacagaatttgttttgcatcagggaaatcttttccaaatccaagcatcaattctgaatcagctccacgaaatccgtagattgcctgatcgtcatcccctactacgaacaaattattttccggctgggccagcatacggatcacatcatactgaattcgattaatatcctgaaattcatcaatcaaaacgtatctgaatttcttctgccactgtgcaagtacatctggtcttgattggaacaattcataacaaagtaccagcatatcatcaaaatcaatctttttcagttcttttctatgctgttcataattacggtaaatattgcgaaaagcatccgcactacacttttctgatacaaattcttccagcggaatccgattattcttcacttttccaatttctgccgcaatatcctgaataaaatcttcttcatcaaagatctccattctttccttgttaatcacgccacgcaaaatctgatatttttctgtctccgaaagaatattttcctgattcatccggtaagcccatttcaggattccataatagattccatgaaatgtacccactgtaaccggaagatctcttttgcccataaccaaacagaggcgggatttcatctccgccgctgcaaatcttgtaaaagtaacgaccagaatttcttctggtcttactttctgtttctctataaggtattttactctgtttacaatcgtaagcgtcttccccgatcccgggcctgccagtacaagacatgggccgtctgtgtgctgaatcgcctgcgcctgtgcttcattaaatcccattgtacctcttttcgctgtccttactgaagtttctcgattccaagacggattcttctaagagactcctcttttccgagtacttccatcagttctgttgctccacccggagtgctctgctttccggaaactgctgtacgaagcggccacattacataacctactttgtatcctttttctgttgcaaatgctttcaatgtctcaaacaatgcatcattactaaagtcctcctgcgcctcgagaaccggaagaacctcgttcagaagtgcgagtgacttctcaggatctgttttcatcttcttgtgtgtatacagtgcaatatcgtaatctggaagttcttcaaagaaatcaacctgctctttgatctccggaagaatctcaattcttgtcttcacaagtgttgcaatcttcttcagatcatagtcctttgttactgcctctttcagataaggctccgcaagtgcatagaacttatcaaaatccattgccttgagatattctccgttcatccatttcaatttcactgtatcaaatacagccggagatttactcatatgatgataatcaaatgcctcaacaagctcttccaatgagaagatctctctgttatctgtcgggcaccatccgagcagtgcaacataattcacaactgcctctgaaacatatccctgctcgatcagatcttcataagaagaatgtccacatctcttgctcaatttcttatgattctcatctgtgatcagtggacagtgtacataaactggtacttcccagccaaacgcctcataaaggcggttatacttcggtgctgaagataagtactcatttccacgaacaacatgtgaaatctccatcagatgatcgtcaattacatttgcaaaattatatgtcgggaatccatcagatttgatcaggatcatatcgtcaagctctgcattcggaactgtgatatctccgtagatctcatcatggaatgttgtctcaccttcattcggtacattcagacggataacccatggcctacctgctgccagattcgcctctacttcttccttgctcagacttaagcagtgcttatcataaacagaaatctctactccaccttcggaaacctgtgtctttaaagactcaagacgctctttgtcacagaaacagtaataagcatctccctgctctacaagctgctttgcatatttaagataaagtcctgatgcattacgctcactctgtacatacggtccatatccgccatctttatccggtccctcatcatggatgagacctgttttctccattgttctgtaaatgatatcaagtgcaccttccacaaaacgttcctggtctgtatcctctacacgaaggaggaaatctcccccttcatgctttgcgatcagatacgcgtatagtgctgttcttaagttacccacatgcattcttcctgtcgggcttggtgcaaatcttgttcttactttcttactcattctatcttctccaattcttgtttgttattgttcaatctcgtcatattatagcgcaagtccccagattcttcaacaaacaaaatcaatgtttttcttttactccaaaagtttcaccgtttcaggaatacttcccgcctgttcaagtgtacaggatcttgcatcaatacattccagatttgttccatcaaatgcactttccgcaaaacttttcacactttccggcacctgaaaggttcctgtccacgctgccggaaatgcaagaagaactgtgccatctgccgtgtaaagtacaccatctaccgtaacataggctggatttgctgcatctgcttctatccatcccagattactcagccccacaaacgctcctgactgaatatttgttatattagcaggaatttcaatctcttctacagcagaaccaagacccgacagtgctcctctcgcaattccggaacatccttcttcaggaaagtacaatactccatcctttatcacttctttgtctcctgaaagtccacagatcataccttccgcattaataagatatccggtatctgtatttcccactgctatcgacccttcttcatcctcattttcattttttacattttccattgaatcaggatttgtaattaccggttcacttgcaacatttatagttgtatctcttttcacgcctggtttttctgccacaatctcttctactactggtttttccaccgcaatttcttctaccataggttcttccactaaaatttctgccggaacagctgctacctggataacatctgcttgattaacatctgtctggatagtttctgctgataagaaagaatgctcatccattttttccggttcttttatctgttttgttattgttactttttccggcagatcatttcctgacacatttatatcctctgttgtcgcacagacctctatttcgggaatcagattcttttccaaatataatgaaacaatttcctgtgcagacatcagaatcagcgcaccacttaataaagtcactcccactctgacatatggttttctcgccgcttcctgatgccattcattccaattcagtcctatatccatgttctcttattcctttctctttcccccacattttaatatacgaaataattttagtttatcaaagaaaaagggatgctgcaaccaaatgcaacatccctttgatttttccgctttgtcctgatagattccaaggattctatacgttaatttcagccttcacgccaaggatctctttattcttttcaagcagtggacggatcacattcttaagataagcatctacctgctcacttgcacgtccaacatatttctccggtttcattgtcttctgaagatcctctaaagtcaggttgaatgccggatctgctgcgatcagttcaagaaggttattgtcaagtcccttctcttttacatttcttcctgcttccatagaaagctcacgaattctttcgtgcagctcctgacggtctccaccggctttaacagcatccatcataatattctctgttgccatgaatggaagttcggacatcagacgcttctcgattactttcgggtatacaaccagtccgtctacaacgttcagacaaagatcaagtattccgtcgattgcaaggaatccttccggaacactcaaacgcttgttagcggaatcatcaagtgttctctcaaaccactgtgttgcagatgtgattgccggattaagtgcatcaatcatcacatatcttgaaagggaagcaattctctcacttctcatcgggtttctcttataagccattgctgaagatccgatctgtgtcttctcaaatggttcttcaatttcttttaaatgctggagcagacggatatcattagagaatttgtgagcacttgcagcaattcctgccagtacattcagtactcttgtgtctacttttcttgaataagtctgtccggataccggataacatgccttaaatcccatcttctcagcgatcattggatcgatcttgtcaattgtctcctgatctccgtcaaacagttcaaggaaacttgcctgtgttcctgttgttcctttagatccaagcagtttcagacttccaagtacatattccagatcctcaagatccatttcaaactcctgcatccagagagttgctctctttccaacagttgtcggctgtgccggctggaaatgtgtaaaagcaagtgtaggctggttcttctgctcctctgcaaacttcgcaagctctgcaattacattcacaagctttgtgcgaaccagtttcagtgcttctgacataataataatatctgtattatctcctacataacaggatgtagctccaagatggatgattccttttgctttcggacactgaacaccatatgcataaacatgagacataacatcatgacgtacaaccttctcacgttcctttgcaacctcaaagttaatatcatccgcatggctcttcatctcttcaatctgctcatccgtgatgttgagtccaagctccttctcagtctctgccagtgcgatccaaagtcttctccatgttctgaactttttgtccggtgagaagatatactgcatctcgcggcttgcataacgctctgaaagcgggcttacataacgatcattactcataattcttttctccttgtttcatatctttatcgtaactgttcatctattataacacataaactgagtcttcaaaatcaattttgttcaaatgcctgactgatatcctctttcggaacttccatcggatactttcctgtaaagcaggcatcgcaatacttaagatctccaaccatgtctttcagtttctcaatctccatgtatccaagagaatctgctccaatcagctgacggatctcctcctgtgtgtgagtatgtgcgatcagctgctcatttgacggaacatccgttccaaagaagcatggatgtaagaacggtggagaactgatacgtacatgtacctcttttgctccggcttttttcagcatcttaatgatatttgcacaagttgttccacgcacgatggaatcatctaccattacgattcgttttccctttacaacttccggaatcacattcagtttgatttttacactggaaacacgttcgctttgtttcggtttgataaatgttcttcccacatagctgttcttgtgaaatgccattccatacggaattcctgactgctcagaatatcctttcgctgctaccagaccagagtccggaactcctacaacaagatcagcgtctaccggataagattccgcaagtgcttttcctgccagaattctggaatggtatacacctacaccatcgattgtactgtctgttcttgcaaaataaatatactcaaaaatacatcttgcctgtttttccgaatcaatcaccatactcgtatctgactggattccatgttttcttgtaattgttacgatttctcctggaagaacatctcttacaaactcaccgtctacagctgcaattgcacagctctcagaagcaaggaaatatgtattgtcacgttttccgatgcacagtggcttgagtccaaatggatctcttgcaccaatcatttttctcgggctgctaacaacaagtgcgtatgcacccttgatcttctgcatcgcacgcttcactgcttcttctgctgtcggtgtatgaagacgctctctcgcaataagatatgcgattacttcagaatctattgttgtctggaaaatagcacctgtctggctgagttcttctctcagctcgattgcatttactaaatttccgttatgtgcaatcgcaagtgttccctttacatagtttataacaagtggcattgcattctctacacgtgttgcgcctgctgttgaatatcttacatggcccacaccaagatttcctttcagctctgaaaggccctcttcatcaaacacgtcatccacatggccaagtcctttttttgaaaggacgtttctcttcccataagtgtctgtcactgcaataccgcagctctcctgacctctatgctgcagagcaaacaagccataatagactgatgcagccacatcatgcccatccacatcataagcaccaaaaacaccgcattcttccccaagtcccgtcactgctttttcaaattcactcatgtcagtttatgctccttacctagttcctgctagtttttatcatgatttctgtatcatacaaaaccgattataatataaggcggagtgaaaatcaacattccctccaccttgtatttcttcctgctcattattttatttacgtccaatatattagtatttctaatatattcgtcgttttattcttcgtatcttattaccgccttcattttttgtccagtatttacaaaatcactatccatttgtataacgagacaaaaattgacgggtacgctcttcttttggattctcaaacacttcctcaggagttccctgctcaagtatcttaccgtcatccataaacagaactttgtccgatacgtctcttgcaaatgccatctcatgcgttacgatgatcatcgtagtattctgatctgcaagtcctttgataactttcagtacttcacctgtaagctccggatcaagcgccgaagtcggctcgtcaaagcatagaatatccggactgagtgcaagtgcacgggcaatcgccacacgctgacactgtcctccggaaagttgatgcggatagttattcatacgctctgaaagtcccatctgatctaagaggcgctttgcttctgcttcaatctctgcgtgtatctctttcttgcgcgccttataatcaggctgactttttgcaagtagttccttcgccagcattacattcccaagtgctgtatactgcgggaacagattaaaagactggaatacaagtccaaaatgtaatcttttcttacggatctcactttcctgttttgttacaggatttgcagcatcaaacaataattcatcatttacacggatcacacctttatccggtgtctccagaaaattcaggcagcgcagaagtgtcgtctttccacttcccgaggaaccgatcaaggaaagtacctgtccacgttccaacgaaaagctgatatctttcaatacttctgtccgtccaaatgttttattaatatgttctacttcaagtattgccatttatctcttcctccccatttaattaaaatattccagcttcttctcaagctttccaagaaggactgtcagaataccattgaagatcagataataaaaagctgtaaagaacatcggccagatcgcacctgagattccctgagaacctttcaggaacgcctgtcctgcccagataatctcctgcagtgcaatgattcgtgcaagagaagtatcttttacaagcgtaatgatctcatttgacatcggtggaacaattctcttcaccatctgaagcagcttaaccttaaagaagatctgatgctttgtcattccaagaacaagtccggcctccgtctgtccctgtgggataccctggattcctccacggtaaattaccgagaaatagcatgcatagttaaagataaatgcaaccgaagctgcaagaaatcttccgctttcaccgccaccccaaattgggtttcctaagaccagtcccgggaaataataaatgatcagcatctggatcataagcggtgtgcctcgcacgatccaaacaatgatattcgtgatataactcaacggtttaaaatgtgacattgatccaaatgcaataaccagtcccaacggaatagctccaagaagcgttgcaaaaaacagcttcagcgtctgtaaaaatcccacattcagtgagtgaataacgattggaaattgttccataataagttccattttattaaagctccatcctaaatttatttttcaatcaatgcagcctgcaccttgtaagtctcagcacatttcttcattgatccatcttccatactcttcttaaaatagtcgttcagagctgctgcaagatcagattctttacggaatccaacaccatactcctcatcgttcagacttattgtgtaagtaagatctgcataacctgttccttctccaatcatagctgctgccatcaaagcatcaattgcagctgcatctgaatttcctgaagcaacttccatcaatgcatctgcctgtgatgaaacggctgtatactgagcaccgattctgtttacctgctcttctcctgcacttcctgcttctactgcaaaagttaaatctttcacactatcctcatcctgatacttatcagctttgtcagccggtacaactacaacctgtgcattattcatataagcatctgtgcattccatggagctttccacttcatctgtcagtgtcataccattccatacgcagtcgattgactttccatcaagctcaagctctttattatcccagtcaatctctacaaattctgcctcaactccgatactctctgcaaatgctttcgccatgtctgcatcaaatccgacccactcaccattatcatctttataatccattggttcaaagtcagtaacaccgaccacgagtgtccctttgtctttcacatattcaagatcactccctgttgattccgctttcttattcgcattagaagagtctgaaccacatcctgccaacatagaaactgcaagtcctgcacataataacacacttaatacttttcttttcataataacaccctccatcattgagtttggcttttattctctaccaatgagtcactgtactacggtaaagttaccgttgtattctaccatagcatacaatatatgtcaaaccccaaaacagtaaccaaaaggtacagaacaatgcaggttactgttcactcctgtgtcaatcactccgctgattgacacggaggatgcgcgttttgacttgaatgcatctcgccccatcgccaaaggcgatttaaaatggcgagatgcgttgctggtcgcacatcgtgtgaacagtaaacaatgcagctgctcatagattctgtgaacagctgcacaaaaagtctgtattatgtatgatttcttctatgtttcctcttccacttctccaaaagtacttcatttggctcaatctgaagattctgcttcacttcgtccatctcacttctcatctgtgcattcacttcctgatattcactgtgctttgtaagcagaatatgaaattcttccagcgacatatacttataagacgcatacagatatggttttagtaattccttatcttcgcagatctggtaggctctgtcatacattttggccgcttcctgataaaggaacaatcgtccatatgccgctccaagacatgcatagatctttccatagaatttttcatctacactctcatctttttcctgattcaggatttcctgataaacaatgattgcttcttcaatctcaccgctttcaagaagattatcgcctttatacttcttacgctctacatccttctgatttttcagatgttccaaaacattctggatacggatcatctcagattctttatagatctttgaagctttcaaaattgtaagaacaaagttctcgacagatccacgcatacgcatcaaatctcgaagctgctctgccagttctttcataccgagctcttcttccaaccaggtgcaaagcggttcattcatgatcgtataatcgatcagatataaattattacacagatagtaacacaattcttctattgtaaagatcctgcagtggatcctggaaatctcataaggatgtgctgcgtgtctgtcatgacaaagaattaaatttcccatcattacctcctaaatgtatcaccttttcctcacggaaatccgtcggcaggaagaaatctccaaatccgacatcacgtactgtaatcttgcaggttttttcatcctgaaacatcgtttctatctgaagtcttgtagagtactctgctcgctttggaagtctctccaaagagattttttcggtcttaaccgttccctgaaccagtgactcgatatggaattctatatcatcaccctcttcaagtatcacttcccactgattatttgactcataccagtgtgcaccccaggaaacaagcggataccacatttcctgaccatccacacgcatattgactgtaatctgatctgtcagcttagtctccgatagataaaccggattctctatatgcatatacaattttctgtatgcagtatagcaagctcctttgctgtacagattatttccgataaatgctcttcttccattgcaaagcacccgcaatgacttcggataccagttattttcgaacccttctcctgtcaggaatacggaagaaacaatcctcttatcaaacacgctctgtataaatttacagaacatcgcatcggcttcttttgctttgtcctcattcaaaaccggataaacaagtgccagttctttcatatgtgcatttgcaacttcatcaaccgtaacaaatgtagtctttccaccaccaagtcccggcttcagtctgcgcagcatatatgctttgatctcattacggtcacagcagaacaatgctgcatcatactgccacagttctttcggctgatagaagagataattacaaaaactctctttataatcctgaataaagatatgtcttttatcaatattcatgcgaactgcgatccttcgaagcatctgtgccagttcttctgtaagaaccggtacactgaacacaattccatcaattttaggaaatgactgtaaagacatctggataaactgtgaaagcagccatactgcatcatatgtctcatcaccaaattcaattttctcatttgcaagacttctcgaaagcagacgggcaacggtaaatccttctttcagtgttgcaagacgtttcgcctcttttccatatgcccatgtgtctcttagttttccaataatcaaaggaatctgaaaattatctgagtcaacttccagtgtctgaggttccatctctttatcattataaaaactgatctggcatgtcttttcatttatctcatatccaattatacttccctgtcccatgaaaagatttcctccttaatactgtatgaacatatgtgatgcaaccgcatcttccagtgcatactgcttcatcttcttctctcgttcttccggatcttcttccagaataatgtcattgagccttccatatctgcccggttcacctttttcaaccgtatgctggcagatctctttctcacttctgtaagaatttccgtcaattgtttctttaaaataatagatcaatcgttcatgcgagaacaacacaaacttcttcacatacaaattctcatacattggtgtcagaagttctgttgcataatcagaatctccgtttccacctttctgcaactgataatacaacataacacggctatccttctggcccttgtattctaccagtgtcttatcccacaactggaattcaatcagccactccttatcatacttaaggaaaaatgggaaataaatctgtttgccacaaagttcctgcataaactttttcagcgtcttcttaaggcttgtttcatactcttgatccgaataatatttcaaaacagcaatcatacaaatatcgattgttgcctcacctttctctgcttccctgcagataatatcaattatagatttctctatcctacgtgcttctacaacatattctctggagacatatgccagataagcctgctggagccggaagtatgcaccttcatcataataagcttcaaatacttttgtctcctggaataattcctctgaaaagagcatctgtgtaatgatccgttctgccagtttatgcgtatggacttcatactctctggcaactttccacaattccttcatctcctgtgttgctccacagtagaagtttgccaaatacgtaagaatcactttatcatactgttttttcttaaataaatcataacaaacataggtcaggaaatcatcattctcataatttgtctcacgaatcatcttgctgcacagtgcctggatctcatcctccgggaaattttccagacccttttcctttacgatttccagtgtcagctcttcctcttcttcaaacgctttgcttcggttcaggctatttgcatattttctgcagatatccatatatctaagttcataaaacagacgtttactctcatatgggatagaatctgtataatgtcttccatcttttgcttcccatacaatgcgatccgtctttgcatacagaaatactctggctccattctctgtatatgctgccttctgtgtaattgttccatcagctgcgattacatgaataaatttcatattcggaacctttgttgtaatccaatatgcgtgacacacatcataaagagcgcggattctgtcctgactcatgtctgtctctacaaggaatcgcttataaatgatccgcagatcttcatctatatttctcttctccagctgattccatgtgaattcttccatctcatccctgtagtgcgcataaatctcgcttgtctcatcttcataagtaataagatttgcatacaaaaatgcgcatttcttataatccagagaatttccatgcataaaatacaaatataccgaacgaggaagctgcttatgaaattcttctggtctcgcagccgccatataatattcgtaaagctgcgcgatcttcaactctgcgtctaccgctttctcataccaatggaaatagatgtgttctgttctgctgccttttataagcaatgtacagatagaagtcaatatcatcgcttcatcatacatctcataacacttcacaagtacattatacagatgtttatcaaaattcttcatctgacttgccaagtttgctgtatataatgcaagttccttcgtcatcagtttatatttcacgccaaaaagcagaacctgtacttcaaactgtccgagttttttaagagatgagctcttctctttaaaacaacggaatgcctgaagatagaaccataagctgtgagacttatactccataaactgcttctcaagcacattcagtctttcactgtagattttatattctgaatcaacctcaatcagcatacaaagaatccgccagctgtctggatgcttcataaaagaacgtgaaagttcttctgctacccttctctgcccaatcgaatcattactcagctttgtcgtcagataaaggtaataggaactcaattcaacatccttaccgattgcaaaacgattgtagttataagattctaaaagccattttgcctcatccatccgattacccaaaatgcagatatgtgcctgggcaagaaggtaaaattcattacgttcatctacctcgcgaagatgtgaaattttctttatagaagcctctgtccaatcttccagtgacatcttgtcaccttcatatttcagataatctttcagaattccattaaattctttttcatttgcacgatgttcctcatctctgcaaatatccttttccactacgacctcataactcaatgtttcatatggagtttccagaatgattcttccaaagttacttcctctgtgaagcttgtccatagaaataccatattccagacgataggcattacctataaattcgtctgtcgtcagatgtctgtgctcaacagaaaggaaatcgccttctgttcttacatcaatctccagatatccccaggtatttttcttcacagtaaaagtctcttttctgtcttctacaagagaaataaaagcacggctttcttcttccaatgtaagaaaaatcttctctttctgcttgcaccctaccaggaattcttcaagggcgtgctgatccagttcccatttacgcatattattataaagcgccttgatcctcgtatcttcatatttgagaatctcaaagaaatctctggaccggaataacttcactgcctcagctgcatcacgatatgtaagcttcttaaaatcttccaggctctgaacctttccgtatcgagtcataacaaatggtttctcaataattgcagtaaatgcaatatcatactctccaccattacatacaatcgtaaatttcccatgttcaacatgtcccggcacaagtcctcttccatcgtatgtataataaatatttaccggatttccatcaaaaccctgctctacgcactgtacacgataggaagaaggatatacaagtccacgtattgtcccttccccttcattctgcagagaaaagcttccctcatatttttctccttctccgacacgcatcgtaatgtgagtctcaggaaaaataatttccggctgcgggatgtgaaaatccccctttgcaaaacgtttgatcttattcttcaaatccgtcacctactcaaatttttaatcatccataagtttgcttctggcaactgccaaaaacgctactataaattatatcattagtatacatgatcttgcaatgggtgattgtataaagttttacatccattttttcattgaaattcctcctttatttcttttgaaaaaatggatacatttttatcagtagcttcccatcattggatacaagtaagtaaaaccgagacaaatcaaacagaacgtgctataataaaattcatctgaatgttatttctacaaaggaggacttcattatgaaattagtaattactatgagtcgtcgtttcggtaccggagccagcattattgctgaagagctttcgaaacgacttgatattccggtctatgacaaggcctatatagaagaaaagctctctgatcacaaatatgaaagtgaagctgaagcaatccggaaactggctgaaaacccttgcattattctcggacgatgcgcctcagatattctgaaagaccggatgaatgtattaaacatctatgtgagtgctgccaaagaggaccgcattcagagaatcatgaaaaaagaaaatcttgatcatgatgccgcaaaagaaaaggtggagcatacggatgaagagcgtgctgcttattattatgaacacaccggcaagacctggggagatgtgaatgattatcacatgattcttgacacttccgagcttggtgttgaaaactgtgctgatatcttaatgcattatttcgaaaaactggaatacatttaatttttcgtgaaagcacggactttggctcgttgctcgtgtaaatataacagggacaaaaacttgttggtcttcacaaagtttttgtccctgtttttttaattctggctgtctgaagtatctgatgtatctgacgttttaattgttacaccctgtttttcaaaactgatcttcttccatacttttttctcttctttgatttttgtatcctttttccactgctccagaagtgaatcatactgttcctgttttctctcacttacaatactttcttttttactgtctgttgcctctctgtccaaaagacttgtaagctttgcaatataaattccattctctgtctctataatatctgtaacatcgccttcatttgtcaatgcatctgctgctgcaatcagatccttatccgggcttgtactttcagaatcaaatgtagctgtctgggctgtaagtcctgctgctgatgcaacagtctccatatcttctccaccctttaaccgatcatcaaatgcctgtgcggtcgtcttcaaagcttctttctcatcatctgataatgtctgggattctcccgaatcatctgttgttgtatatgagaataagagatattgcatactcttctgtgctgcatcttcatctgatacattctcatccacaccagcttccattgccgtttccatcttattcgaaattgtcatcagttcgagaactttagccacttcctcctcatctcctgataccactttcttcacatcatccgaattatcttcaccgaattttgctgctgcatctttaatcgcctgctgctcttcctctgtcagtgcaacatcatagtcagatgcatgctgtgaaacaagatacatattctccagattctcaagaatactcttctttgtctgctcctcatatgtctgattgtctgacacttcctttgcccacatctcttctgctgttgttcccatcatactcgcatagtaggtttcatactgagcctgctgcaatcttgcgtaaaaattcgcgactccaagtgtaatcttctcatcaccgactgttgcaactgtctcatctgtatttattgttccgcatcctgtcaaagatgttgctgtcaatgtgcctgccactgcaagcactgccagcctttttgccaaacgtaccatctggtaaatcctcctctttttacgtatttacttacgcagccatactaccgctcattatatcgtgttttttgttctatcacaaccccaaacacagaatctcctcaacttccctgatctaatcgaagttcgcgaatactctctataatttctcttagcatctgcagaacattttcccctttctcttttccgcttctccctttcttttgataaaggaaatacgggactgcttctgctttgaaagtcatattatttccatatttctttaaaagtgccggaatttttgccggatccagatttgctttttcatataagataaatttgtagtcttttcccttttgttctatcgctgtaatatatgcagaatgcgcaagactcttaagtgctgcaatatgaagaagctgctgtacttttttcggaagatctccaaaacgatcaatcagttcttctgtcatatcatccatctcttcttctgtttcaattgtggcaattctcttataaatatccaatttttgatactcgtttttaatgtaagattccggaataaatgcatctatatcaagatcaatcgttgtagcgtagtctgcttcttcttttttacctttcaactgactgacagcctcattaagcatcttgcagtacaagtcatatccaactgctgccatatgaccactttgcgactctcctagaagatttcccgcacctcggatctcaagatcacgcattgcgatcttgaatcccgatccaagatctgtaaattcacgaattgcagccagcctcttctctgcaacttctttaagcatcttatccctctgatacagcagaaatgcatatgccattcgattggatctcccaactcttcctcgcaactgatataactgtgacagtccaaatctatctgcatcttgtataatcatcgtattagcattcgcaatgtccagtcctgtttcaataattgttgtcgatacaagcacatcaatatcaccattgataaaatcatacataatatcttccaactgatgttcattcatctgtccatgtgcgtaagatacccttgcatccggcaccagtttctgcacacgaagtgctagatctgcaatattttctactctgttataaacataatagacctgtccacctctggcaagttcacgctcaatagcctcacgaaccatctcatcattgtattccattacatacgtctgtattggcatacgatccatcggtgcttcctcaagcacactcatatcgcgaattccgattaaactcatatgaagtgttcttgggattggcgttgctgtcagcgtcaacacatctatattttctcttaattttttaattttttccttatgcgtcacaccaaaacgttgttcttcatctatgatcagaagtcctaaatctttatatccaacatcctttgaaagcactctgtgtgttccgatcacgatatcaaccagaccttttttcaaatcctctactgtttttttctgctgcgcctgcgtccgaaaacggctcatcaagtcaacacgcaccggaaaatctttaaacctttgaataaatgtattatagtgttgctgcgcaagaatcgttgtaggtacaagataaacaacctgttttccttcctgcactgccttaaaagctgctcttatcgcaatttcagtcttaccataccctacatctccgcagatcagacgatccataatcttcgtactttccatatctttctttgtatcttcaattgcacgaagctgatcctctgtctcttcaaatggaaacatctcctcaaactctctctgccagaccgtatccggtccataaacataaccttctgtctgctggcgcgttgcgtagagttttacaagatcttttgcgattaactgaaccgctttttttacctgtccttttgtttttttccactgaggtgtcccaagcttattcaattttggtggctttgtatctgctcctgcgtatttctggatcagatccatctgtgttgccggtatatagagaattcctccatccgcataggaaattttcatataatctcgagtaacagtatctacttcgactttctcaattccctgataaattccaagtccgtgattctcatgtaccacatagtctcccggtttaagttcggcaaattcctggattttttttccttcataagtttttcttttcttttttttctttttcttaccaaaaatatcagattccgagatgaccgtaaactttaacatcgggtattcgtatccctctgcaatgtaaccacaggttaccataatctctcccggattcacctgccgttccatctcttcactataaaaactgctcaggtcataatctctcagatcttctgcaagacgttttgctcttgttcttgaacccgaaacaagaatcacacgataccctgttcttttcagtttcttcagatctcgtgtcaggagctcaaaactgctattatacggattgacagttttaacctgcagactgtagacagaccttactttaaacattccacattttgattccaacatggtaaatgcaattccataatacttgttcatctttccaatcgtatgatctgtctgttccacctgaatcggaatctcatctgtctccataccggcttcttctctgctctccaagctgtgaaaatactctttttccacgatttctgcagattcttgaagacgtaccggttcatccaaaaacaagattgtctcctttaccggaaaatatgccaaaaagctttccgtttccatctgcttccagttctcagttgccggatagatttctatttcctgtaaattctctgtcgacctctgactttccacatcaaaacttctaatagaatcaacttcgtctccccataattcaattcgaaccggattctcctctgtcagtggaaatacatccagaatcccacctctgactgcaaattgtcccggactttcaacctggttttccctttcatatcctaatatcgaaaggatttcctgtaatttctgaaaatccaacgcctcttctgcatgaatcttaatcctgttcccgcacagttcttctttcgatggaagcccatccagaaatgcgtccattgttgtaactacagtaattgcttcccgtcctttcttctctacaatcgcacgcaatacttccatacgtttccctgtcaaaaatgcgcccttaatatctgcatgataaaacaaaagatctcttgccggataaaaccatacattttcctccagtacacgccattcttcataagcctgttttgctttttcttcactggaaaaaacgatgactctgtactcaaagccatcgctcagtgctttcgcaagatgtatcttctgtgaattcacacatcctgcgatttgcaggaaacccgttttctttcttctcgaactgacaatctcctgataatcagccagttcttttaatggttctaaaaaagcctgcatctctactcgtccttctttttacgattatattcgttcatcgcttcgcttatctggtcactcacgatcagttccaccgcttttaccgcattatcataaccttcgctcatcagttcctgttccgccttagaaaaatgtcctaaaacataatctgcaagatcatacttcggtggtttttctccaactcctacttttattctaggaaaaacctgtccgccaagatgtgcaataatattttttattccattatgcccacctgcactgccttttgcacgaattcttaattgtcctacaccaagactgatatcatcataaatcacgatcagttccttctcaggatccactttataatagtcaatcacacttcggatactctcgccactaaggttcatataagtctgcggttttaccaaaatcaccttctgtcctgcaatcataccctttccaatcaaagctcgatgcttctccatagttacatctatattatatctctcagaaagtcgatctataacatcaaatccgacattgtgtcttgttccttcgtattctttcgtcggattacctaatcctgctataatatacatcttcttcttcctttcctaaatacattttccattctcatcttcccactgtaagcaacaatgacttattttcataggttttcctcttgcaaacagtaatctttattttaccgcatgtgtgaatatttgtcatgcataattgctctgtaaattcataaattgtataaaaagggggatactcatgaaatcaaaaactaaaatcattgtccttcatatgaaggagatcatctatactattatttttgctgctctcggcattcttctgatccttcttctgattcttatgttccatccaaaagagcagtcagcagaatccgatccgcaatgctgcattgctgaaactaacacttcttcataaacactcaaaaaatgccacttgccgggtttgtacagcaaaaaagccacagtccatcctatctgtggctttttgatcgctttttcacaatcactgctattttaattctgcttatccttctacgatcagataagtaccatccggcagtgcaaacacttcagaagcctcttccaattcttcctctgacatcccgtctacatccatgccattctcttcaaagtattctcttacttcagccagagattctacaacaactgccatacagtcctccagaaaagcttctgctgcctcaagggtctctgctaccggttcatcaaaaagctgctcctgcttctccaaaaaagtcttcagacactcttcattgtactctcccattacttctcctcctgtttcttaacaatctttcgtatctcttccgctgaatcaacaatacattcagctccgtcctctaaaagagcttttcttccacggaatccccaggacacaagaattgtctgcatctttgccgcatgacccgttgcaagatccacttctgaatctccgatgtatgctgcttcttccggcaaaaccccaaatgaactgacaatcgtcaacgcggccgtcggatccggtttcttaggaactccatccttctgcccctgtatatggtcaaaaagttctttcccaaatacttcttcaaccacatggacagcctgtctgtctggcttatttgataaaactgcaagtttgataccactctctttcaactgctgcaacatctgtggaattccttcgtacggagcaaccttatacatacaatttgcatcaaatatcctggcatacgcttccaccgcctcttcaagatgacacagttgtgtatccccgcctgcctttaatgtccgttcaagcagaaccttcgccccatctccaacgaactgccggcactgttcctttgtgatctgtggcattccaatttctttcatcgtctcattgactgaatattccagtgaatctaatgtgtttgtcaacgttccatccagatcaaaaatacaagcctttatcatagctgcctccatactttatcattggttacattacaccataaccatatctgctcttttctgttactttctgtaacattttcttcccatttatcatagtatgaagtcataaaaatttcaatactttctctctattttccaagaagatattgtctcattgtttttaaagcatttttctctaaacggctcacctgtgcctgcgaaattccaatctgttccgaaacttccatctgcgtctttccttcaaaaaatcgtaaacggatcagccgtctctctctttcattcagccgttccatcgcagcttctaaagacaactcttccacccagttttcttctctgttcttcttatcactgacctgatccatcacatacagtgcatcgccaccatcattatacaccggttcctgaagactcattggtgtctgtactgcatccagtgcataaactacttcttcttttgaaagtccaatctcttctgcgatttcctgaatgctgggttctttcatattttttcgaatataaccttctcttgtataaattactttataagctatatcacgcaatgagcggctcacgcgaagggaactgttatctcgcagataccggcggatttctcctatgatcataggaactgcgtaggtagaaaacttcacctggcgatctggatcaaaattatctacggcctttacaagccccacacatccaatctgaaacaaatcatctgcattttcattactgctgtcaaaccgtttcatcacactaagcaccagccgaagatttcctttgatgtattcttcccgcgccaacttgtccccctgacgaatcctgcgaaaaagctcctccttctccttttccctgagaagtgggagctttgatgtattcactccacacagttctaccttattcacaaccattgtaagaaacctcctaagtttttttctacttagaatcattctcactctttgaataagatattccatgaagtgctgaattttataaagttttagtccttgacaatcaaatatcccatttatccgacaaattattaatctgcgactcgaattttgctttgtctttattcgcgagaccttcgttcttgtaaataacatcaagtaaacgctttcctgctgcaacaagacgttcaaacgccgcatccgctttacgctgtgccggttttttcgccttcaccggaatctttacaccttcacttaagatctcatttgtcaagaggtctgcttcactacacggaaacggtgcataagcctgatatccaaacttttcttccaccgtctttgcaaactcttctgttacagtatcttcaccatgcacaacaaagacgcgttgtggcgcctctttaaacgctcccagccattttaagagtccattcatatccgcatgaccactaattccatgaaggctctcaattcttgccttaacttcaatcggctcaccgaacagcttcacattcttttcgccctcgatcagtctgcgtcctaaagtgcccattgcctgatacccaacaaaaagaatcgtacactcttctctccacaaattatgcttcagatggtgacggatacgaccagcatcgcacattccggaagctgagatgatcacctttggtttctcgataaaattgatcatcttagaatcatcacttgttgttgcagtcttaagtccatcaaatataagtggattaatccctgcattaacaagtgcaagtgcatcctcatcaaaacactctctcatattttttgtaaatatcttcgttgcctcaattgcaagcggactgtccagatatacttcgaaattctgatattcttttaataattccttttctttgatctcacgtataaaataaaggagttcctgagttctgcccacagcaaaggaaggaataacaacatttccccctttatcaaatgtctctttcaggattcttgtaaaatctcccagataatccggtttttcctgcgtatgcagccggttgccatacgtagactccatcacaatatagtccgcactctctgtataagccgggtctttaataatcggctgatccagatttccaatatctccggaaaatacaatcttctttgtcactccgtcttctgttgcccagacttcaatacttgctgatccaagcagatgtcctacatctgtaaaccggatctggatcccctcacagattgtaatgcgctccccatactgacaaggcacaagcaattcaatcgcattaagtgcatcctgcatctcataaaccggttcatactccggctttcctgctctcctgccttttcgattcctccactctgcctcaaattcctgaatatgcgcactgtcacgaagcatgatatcacacaaatccgctgtcgcataggtagtgaaaatctgccctttaaacccatcctttacaagctttggcaacattccggaatgatcaatatgtgcatgtgtgaggaatacataatccacttctgttgcactgatcggaagtcccggattctcatacagatccggtccctgttccataccgcagtcaaccaaaacattctttcctgctacttgcagaaaatgacagcttcccgtaacctcatgggctgcacctacaaatgttaatttcatacatcctcaaccctttctgtcctgtatcttttctttttaagcttcagatactttttcttttattttaacaccatacgggaaattgtacatctttctttttattaaatttttgtaactgttattcataccggaccatttccatccgaagtctgtgcataattttcttttccagtcttgatatataagactgagagattccaagttgatccgcaacctccttctgcgtcatttcttttccctccggatgatccagtccaaacctcatacgaacgattaatttctctcttcctgacagtttattcaaggcacgaaacagaatctttctttctgcctcatcctccagatcccgataaattgtatcctcttctgtcccaagaatatcagatagaagcagttcatttccatcccaatctacatttaaaggttcgtcaatggaaacttccatcttcgtcttactgtttcgtctcaaatacatcaaaatctcattctcaatacaacgtgaagcatatgtcgccagtttaattttctttgatggattaaatgtattgattgctttgatcagaccgatggtaccaatagaaatcaaatcttctacacctactcctgtattatcaaacttctttgctatataaacaaccagacgcaaattatgttcaatcagtatctttctcgccttttcatctcgatctgttccaagccaccttaccacctcacgttctttttcattttccaatggtggaggaagaacctcactgcctcctatgtaatgaatttcctgttggccaccaaataaaaccgtcctgacatttggtacaatccttaatttaaatttctccggcacagccactttaaccatcatataaattcctcctggtttctttcttacatcttctgttgcggcacagtttttcattcacaacatctgcaccttgcagttcaatatcaattgataatcttcctctccactgatcggtgattcgctcacaccgatcaacggagattctatccattctttttcatttatttccacacacattttcctgatccggaaaattttcataatgccactaccatgaacacttcgatatggaatatacctgaattccattgcttctttcattacctgatgataaaaattacaatccagtacatgcaccccttcaccactgagtggatctgtcaggcagtttcccgtatccctcaatgcatgaaccttataactatctgcttctgtaaataaaatcacttcacagcaccgttcctgctctatcttaagaactttcaagaacttccaggccatcagaatcccctgtgagctaagcaccgcaatcccataaaacagactgatataatgcagataaggacgaaacatcatcaacgtgccccccaggaacattccaaaaaggtaaagcaatcccattcctttgagtatctggagcatacattgtttcctattttttaaccaaagcatacaaaatggaatcaccaaataaaaggctatgtttttcatccaggcgggaacagatacaaccaccatcagacatgtcaacacacttccaaggaatgctccggataaaacccctttaaaactatattttccacccgtaatccgttctgtcacgaaaagtaacaggctatccatcatgaaattttccaggaaaaaaagatctatgtacaactcatagtgcatcttccaccttccttttcatttcgagtcatcctcgatatcatatagaattataaaatttgctctttggaaattttgtcagatactgacagtaaaacagaaagaaaatagaagaatttctgacatccttcgacataaaagaaaaacggcctgatacttcagaccgtttcatcatttttcaattcaattatttcttaaagaaatccggaatcttaatagactgctctcttactccaccagttgttgatcttggctgcagtgttggcattgttcccccctgcggtcttactgttgatgtctgagctgttctttgtgctgtatagtcataagatggtcttgcatgactttctacaccattcggaagaatagaacttgtcttctgctgtccttccagtcttgctttcagcttggatgcacttccgcctacattatgtaagcctgtagcaataactgtgattgtacattcatcagactttgtatcatcatacatagcaccgaagatgatacttgcactttctcctgcaagctcctgtacataatcagctgcatcagaagcatccataagtgtaatgtctcctgatacattaacgataacattagatgcacctgtgattgttgtctcaagcagtggactggcaacagcctgcttaactgcttcgagtgccttgtcatctccgcgtcctgcaccaataccgatatgtgcaatacctttatccttcataactgtctggatatcagcaaagtcaaggttgatcagagatggtacattgatcaggtctgtgataccctgaataccctgctgaagaacctcatcagcctttttcaaagcttccggcatagtagtacgtctgtctacaacttcaagcagtttgtcattcgggataacgatgattgtatcaacgttctcctttaatttatcaataccattgattgcattctgcattcttgtcttggattcgaaacggaaaggctttgtgacaactcctactgtcagagcgccctgctctttcgcaattcttgcgataaccggagcagcacctgttccagttccgcctcccataccgcaggtaacaaataccatatctgcaccttttaatgcagcctggatctcctcagcgctttcttctgctgccttctctcccatctcaggctgtgcaccagcaccaagtccttttgtcagtttttcaccgatctgcataagtgtcggtgctttacacagctgtaatgcctgtttatctgtattcacagctatgaattctacgcctgcaatctgttcgtcgatcattcggttcacggcattgttaccgcctccgccgactccgacaacaataattcttgcagccgcttcagattcgttggttttaatttctaacaagagtagttcctcctttgtcgtcttattaattcttatatacatcccttattttaattgaacgatacaattcaataagtatataataaagtcttttccgtaaataatcaatagattttttcttatttttggtttttttccaacaattcagcttcaagactgcggtgtaaagttaattgatgctgaatctgcttcataattctcaagatgaagcacccccgcctgatccggatactgttccttcagcttctcaagaatcggtttgatctgtgcaattctgatctcatattctttattcccaattaaaacttctactgatccaaaatataataccacactctgttcattggcatataccagtttatccggtgtaagtgaatatttcaccagatactttgaagcctctgcgatcaaagtgaatgcactgtcatcttccaccggaattttttttccgatctctactttcgatgcatcgaaagaaagtccttccacataaggtactcctgtaaaagttttcttgctttcaaaaagtgctgtccccttccggtcaaaatataaatttgtatcattgaaagaaacataaccggattttcctttctctttcacatgcgcaacaagcgtccatggattttcaaatgtcaatttcatttcttccacaactgacggaacttctgcatctgtataattatatttccagaataaatacaccgtattcatggagagtttatctttctcgagccagctgatgattgaattctctccgtaatattcatttcccttcacctttatactgcgtgtctgaaagagtagaacaaatattacaagcaacagtaatactacaataaagcggaacatccctctcttctttttcttcttttttttcattgatcagattccttcctctgttcatgttttccatacccggactccatctgtatgaaatacaggcaactctattgtaccaaacgtgatatgctaaggacaagccccatttccaaaagcagaaaaacaactgacgttccaccataactgataaacggaagtgtaattcctgtattcggtatagaatttgtgacgacagcaatattcaatattacctgaatcatcatatgtgccatggctcccactgcaatcaacgcaccaaaaagatccggtgcgtgtgttgcaatcacaaaaaatctccagattaaaatcagaaacagtacaatgatagtccccgcaccaacaagccctaattcttcacagacaatagaaaaaatcatatcattctgtgcttccggcaggaatcccagtttttgtacactgtttcccagcccccggccaaacagtcctccacttccaattgcataaagtccttgcaatgtctgatatcctttttcatacttctccggattgcgccagattgcaagtcgctccagccgatagctttccaaggcgagaaaaactcccagaaatccaactcctgatacagccatccatataaactgtgcatatcttggacttgcaacaaaaatcaatgtaactgcgattccgaggataatgattgctgtactcagattacttgctcctaccagaccgacaaccggaaggattgaaagcatcattccggacattatccgaagttttgatatttttttcacatttcggttgatcagccaggccagaaacaagatcactgctactttagcaaattctgaaggctgaaaagaaaacggacccaaagacaaccatcttttggatccgttatattcttttccgaatgccatgacagcaatggataaaccgattgcagccagatatcctggcacagcaagtggaatccatctgtgataatcaattctcgcgatccatagcattcctgccattccaagaactgtagccagtccctgctttttcagataataataagaatcatgaaacttcaccctgccgttatatgcacttgtactggtcagaaggatcagaccaaccagtacgagaatcagcaccgtcacaagcagtgtatcatcatacgtgtgcttctttgcaggacgcttcaatacagttcaccctttacagattatttacaagctctttaaacttatctccacgttcttcataattcttaaacattccccaacttgcacatgcaggagaaaggagtactgcatctcccggttttgcattctctacacattttgcaaatgcttcctcaaatgtatccgccatctcaatatcttcaaatccatgtgctctggctgtctctgcgatcttgtcacgtgtcgcaccaagaagtactaatttttttacttttccatcaaaggaatcgatccattcatcataagcagaatccttatcataacctccaccgatcagaactgtcggacgattcatcgcctgaatccccttaattgctgcatctgggtttgttcccttggaatcattgtaatatacaactccattcttttctgccacatattcaatacgatgttcgactccctggaactctttcagcgttcttcggatcacatctaccggaaccccatatgctgctgccattccggctgctgccatcgcattctcatgattgtgcgttccaagaatattcaattcatctacatggcataccggtgtcttctctccgttcattgcaagaacgatctgaccgttttccagatagattccttcttctaatatacgctgactgctgaaatatagaacctttgactttatattttctccaaatgcccttgtcacatcatcttcgtaattcagaacacaagtatctttctctgtctgattcttcgcaatattttcctttgcctctatgtatgcttccatcgtatgatggcgattcagatgatccggagtaatattcaggatcgcgctgactctcggacggaatgtctgaattgtttctagctgaaagctgctcatctcagcaacaattacagaatcttctcttgtctggagtgcaatactcgtatatggattaccgatatttcctaccacaaagctgctctgcgcatagtttttcataatttctccaagcagagaagtggtcgttgtctttccgtttgttccagtaattgcaagaacgtcaccttttccaaagacatacgcaagctcaatctcgccccagattggaagtcctttctcacgcatctcattcacgattggaagatctgtcggaacacccggactcattacaacaagagaaagtttatcaagaagttcttctttcctgtctccctcaagtgttccaaggacgatttccagtgactcactgtccccgccttcaatctttgcacgtatctcttccgaattcaatttatcgttaccatcatacaatatgacctttgcttcttctttcaaaaggagctcacacgctgcctctccactgattccagagccaaacactaatacatttttatcttttacaaccattcttttatacccccataagagcgatcaggcaaagaattgccgtcacaatagaaaatactgccactacccgtgtctctgaccatccgcaaagctcgaaatgatgatggatcggtgccatcttaaagagacgctttcctcctgtctttttgaaatatgttacctgcagaataactgaaataacttctacaagataaataaatccgacaataatgatatacagcggcatctgcatcatatacgctgttcctgcaacaaaaccacccagtgcaagagaacctgtatctcccatgaacacactggccggatacacattaaaaagaaggaatcccatcaatgcaccgacaactgcgcaagtgatcggctcaatcccacttttcgttccaattgctacaaccgtgaaaaatgttgccaccagaacagttacgcttgatgcaagaccatccagtccgtccgtaaagtttgttccattaactgtaccgattaccgcaaagaaaagaaccggaatcgcaagccatccaagattcaattcataaccgccggagaatggaacgatcattgtaagcggaatcttcgctacttttacgatgtaaaacgcaaaaattgctgttactacaatctggagtgccatcttctgcattggaaaaagtccgtctgaacgtttcatgacaactttaagataatcatccagaaatccaatcagtccgaatcctactgtaaggaaaagtaccgggatgatctttggatagtccttcacataaaacagggacgtaatcacaacagctgccagaatgataatacctcccattgtcggtgttcctgccttcttcaaatgagactgtacaccctccacacgctccgtctggcccatctttaaccttctcaggaaaggaatgaccaccggtccaagcacaaggcttataacaaatgcaatcaataccggaatcactacatgactgttcatatatacacctcttcatttcttttgttttacacagagaatccttcttatgtacttttctgtcatcagattctcaaaatgcactttacagtatactccattggtcagtttttttcaatcccgagatacggaagtacattgtcatagatgctgcgcaaaaccggggctgcaatcgttcctccgtaataaatcccctgtgggttacggatcactacaattccaagaacctgcggatcttccgccggtgcaaaccctataaatgatgaaatatacttgtttgcgcttcttggaagagtctgtgatgttgcagtcttgcctccgatcgaatatccttcaatgtatccatttttaccagatccttcttctaccacactcttcagaagtattctcatcgtctccgatgttttttcagatacaatcccattcttctttttgtatttcagctttcgtatctctgttccgtctttttcaagaactgccactccaaaatgcggtgtcacccggtatcccccattaaccagcgaacttactgttgttgccatttgaaccggtgttacctggaacgactgtccaaatgaaatcgttgccaattccacaagaccaatatcttctacgttatgcataattgttcccgcttcacccggaagatcgatattcgtcagactaagtaatccaaactgtttaaaataagcataaaatttctctgctccaagccgaagaccaatatcaataaataccggattacaggaattctgtatcccctggataaacgtttcctgtccatgtccaccaaccttatgacaccggatttttctgtcttctacaatccggtatcccggacaggaaaatgtatccgacaaagaaacgacaccttcttcaagacatgctgatgctgtaatgattttaaacgttgatcccggctcatatgtgtcattaatacagggatttcgccacatctgatttaacatctcctgagcctgttcatccgtctgttctgtattttcatccacatcaatcaattcaaaaggggtattcagattaaattccggtgtatttaccattgcaaatatctctccatcctgcggattcataagcaatacagatacactatccgcctgtttttcctcctgaaccttttttgctgcctgttcacagtacttctgaatattatgatccagactgatctgaagcgtgttcccggccacaggttcaatcctgtcttctgctactttctcaagttcgactcctctcgcatccgtcactgtaagaatggttccatcggttccttttaatacctcttcatattttacttcaagtccgatgattccctggttgtccccacctgtaaatccaagaactctggatgcaaatgtatcataaggataatatcttttaaaatcctcatctacttttactcctgcaagatccagattacggattctatcccccgtttctttttcaacattcgttttaattttttccattgaagacactttttctacttttttccggatgttttcttcctcttcctcaagttcctgacagagaactgcaatcacctgctccggatcttttatctgattatggatcacggaaattgtgcataccgtcctgttcgttgccaggacaactccatttctgtcaacaatctctcctcttgccgctttgatttttctttctcgctcatgaagatctttcgccagcttctgatagtgtgcagcatcaaaaatcatcagataatccagtctgccgaaaagagctgaaatcaatagaactgcacagaaaaaaacaaccattgctttttttcggttatatgttttatttttcacaaaaaacaactccgagaaagacatttctacaatgtattatgtctttttcggagttattcctgtttgcctgtccgctataacacttaatctatattggatgatgttgcccagctgtccaaatccggcttataattttcatcaacatatgagccgtcttcattactgtaatcatctgtatagtcctgatcataatcagaatactctgtatcttcaaagctctgaccgctctgctgtgtctgactttcccctgtctcttctatggttgtgataccaagatacggaaatgcttctgacatgatattcttcgcaagttcaagaactaacgaactattatcctgtgcatctacatttgcttcatcaattaccacatagataacaacttccggattctcctgtggagcatatccgatataagaaagcagatattttccatctttacgtggaagtttctgcgctgtaccagtctttgctccaatatcatatccttctacctgagctctcttacctgtaccatactgcattaccgcctgtaaatatgtttttactaattcagatgtttctgtcgaaaccgtcttacggagcaatacgggattcttcgtttcaatcacatttccattctcatcctgaatctgctttacaacatgcggttcataataataaccaccgttgatcagagaactgaaccctgctgccagctgagtcattgtcacattaaagttttgtccgaaagcattcgttgcaagatcaaccggtgtcatcgtatcagttgtataaagaagacttgctgttgatgcttctgccggaaggtcaattcccgtatattctccaaagccaaaaatatgctggtatctgataaaattatcaattccgattttttcagccatttccatcaatgcaacgttacaggaattggcaatcgcatccattgtgctttctgttccatgtccggaacgaagatgacatccgatatcattatcccccacatgaagataaccaccacaataataagattcatctccggtaagagttcctgtctccaatccggctgcaacagtgaatggtttcatcgtagaccccggttcaaatgcatcactgacacagaaatttctccagatactactcaatatgttcaattgatccttctcatctatcgcattccatttttcttcggaataaatactggacagatctcttggtttgttcaaatcaaaattagggtaagaagcctcagccagaatttctccggtattcggattcatgatcataaccgctgtattcttgctaccggtcactccacttccttcttctccggcatgttcttcattgaactgttgaatgtatttttccacaatactctgtaaggtaatatctattgtcgtaacaacattattcccattctttgctgcttttacattctgttcgactgtatcatcttcatccagataaccatactctctgccatctgtccccgtcataacatcattgtaagcactctcaattccaattgctcctatatttccggaataagtaaaacctatcacatcgcttgccagcgtattatatgggtatgttctgttataatcatcctccagccagattccctttacatttggataattctcagtatcattctttatctcattatatttctgagccgtctcgtaatcgattccttttttcaatataatatatctgctattaggtttttcttctacaatctctcgtactgtcttttcactgattccgaaacatttattcaatactttaatcgtaggatctatatattcttctttatctgtcattacaacaacatcaagaatcacattataaaccctttcacttgtagctatctttgtaccgtttctatccagaatatctccacgtttatatggaattgtcttactgtcataaattttctgattcagtacaagctttgtatacttgcttcccttcgtaacattaatgtatgtaattcttcctacaagaacaagaaaagccagtataactgctataaacagcagtaccagctttctctgcattcttaccgggaattttttagtcagaaattgaaatctgttcttccttctttttcttcctgccatcttccattattccttatttttcacatccttggattgcgctaaaacgccatcttccgggatgttatcatactgttttacatagtcacttgtcgggctttgataatgaatcactttgccctgagactcataaaccattcccatctcgttcattgccttttcacgaacagtctcaagattaacagaatcttctgcttcctgatgtgcagtatcatttgattccttcagatccgtcagttcccgctgcagcgctgtgatctgatctgcacgattcaaaacatctgcctgtaagcgtaaatacataacacaaataaaaaccgcacagactgccgccacaattagaaaagtcgcatatgccggactgatccgctgcgcacgatgccggtttttaatcacctgacggcttgttctttttttcttcggcttacgaactgtcccatttccagacggtaaagcttctggctgacgcacggcactaccgtacacatagaagtggttccagtctgctactggtctattctgctgtctgcgacctgtgtttctcgccatcgctttcctgtcctttctctggattcttgttcctccgggctctccccttcccggaggaacgtttcgtttatactctaaatactccctgtgatatcaaattatgcacgttcaaagattctaagttttgcactctttgatctgctgtttaccgtcagctcctcttctgacggaaggattggcttcctagtgatcaccttccctttggatacatttccacatacacaaaccggaaaatgacttggacaaatgcacggattctcattcttacggaaagaactcttcacaattctgtcttcaagcgaatgaaatgtaataatgcaaagtcttcctcctggattcaacagatcgatcatatcatctaatgtatcccgtaaaacatcaagctcatgattcaattcaattcgaagagcctgaaatgtacgttttgacggatgtcctgacgtcttctgaatcttcattggtattgcatgactgataatctcattcaattgtcctgttgtctcaatcggaccttttgtgcgttctgcaacaatatgcttcgcgatatttttagcaaatctgtcctcgccataatcacgaatcacgcgataaagttccgattcactatagtcgttgacaatgtctctggctgtcatcttctgacgctgatccatacgcatatcaagaggtgcgtcaacccgatatgaaaatcccctctcagctgtatccaactgataagaagaaactccaagatctactgtgattccatctactttgtcaattcctatctcatgaagccgcggtttcatatcacaataattgctccggattattgtgaccttctccccgaaaccttccaggcgttttcctgctgctttaatcgcatcagcgtcctggtctatacctattaatctcccctgctcgccaagctttgtacagacttcatatgcatgtccgcctccacccaacgtggcatctacatagatgccatccggttttacgttcaaaccgtctactgtctcatgcaacagcactgaaacgtgctcgaatgccatagactcctccttctgactgcctcacttggcggtctttgttgtcatcagatgcgaattccgatcgcttccatacgttctgcaatcgcatccagatcttcctcgctgatctggtttttctcttcccagagtgccttgtcccagatctcaacacgatcctggactccgaccagaactacttccttctccagatgtgcattctttctaagtgacggtgggacaagaactctcccctgcttgtcgaaactgccctcagatgcactcccaaaaaagtagcgtttaaagattctggcatccttgttcattcgtggtaagctttcgagttcggctacgaatttattccattcttcctgggaatagacaaatagacagccctctaatccattacagatcacgaagctgtcaccaagatcttccctcaactttgccgggatgatcagtctgcctttttcgtctatgttatggttaaactctcctaataacatccgaaaccctttctctggaatctatggaaatcttcatgtccactaaaggtatcactaccgtaatcccttcgtttccactctttctccatattgcaccacattctaccacttctcaccacttagctccattgtaaaccacacttccacctttttcaagtcctttttatgaactttttcgtttcttttcagagttaacgttactgttcacttcctgttttggttgcaagaaacacaaaaagaggttgccgctttaacaatgatatgccaccttcatataggataacgaaatataaaaatcctataaccggaggacgtatcacttaatacgacaacctctttttattgcactatatgtaattataacaaccttattctgctgaaagtgtactcagataatccttaacagagtcataattcacttctgcaactgcacgttcctggttggaagaatgcagatcatatgctgaatatccgaaccagccaacaattgcaagtgcaattactcccgctacacatctttttacattgcgcatgatcttctctttacgcattgtcttctttcggtccgccttttccttcttataacgatccaccttcgcctgactcatctcttgcctgctcccttcctattaggtctttagcaattattttaccacagcacatcttaaagtacaacaataattccaccatcattcgcatacatactactaattcctgctgtatctacaataaaggaatctttcacctttactttctccaaaatcaattttctaacgacctctgcacgttccggacagttgcaatgtgcaattgcaagaatcttctcctccggttttacagcgtccttcgcgacatgctctgccatcttcgccaaagctttcttcattcctctgctcttatccaactgacagattgttccctctggggtagaacccataacaggcttgatattcaatgcgctgactaccagagatttcagtcctgtcagtcgtccattcttacgaagtgtatcaagattctcaagaacaaaatacgtatgctgttcttcaatataagcttctaccgtttcaactacctgttcaaaatccattccggcttcttcacattcctgaatctttcgtccgatcaacgtctctccgacagatgctgaacgagagttaaatacatggatcttttcttctccgccttcttccttataaagtttctctccaagaattgcactattataagatccgctcaattcccctgacaaagtaactgcatagactctgtcaacatcacatttgtataattccatataacgctcaggggatggacaggatgacttcggacattcctcgcttgcagtcactcttcttaaaaaatcagcctgatcaaatgtctcgtcatccagaatgtgaaagccatccacttccatgctaagagaagccgtcttaaaaattccactctccttcatctgtagggtcagctctccgcaactatctacgatcactctgtaactcataacttatatcctcccatgctctatcgcatattttttcatcctactttacgtggtttttaatactacatattaatataacacacttcagtcaagttgaaaagagggagaatttatttcaaccgtatcttagatgatattccaagcgcaattcccatctcagccaacaatatcacaattgccgtacctccatagcttataaatggaagcgtaactccggtagtaggcatcaatccggttacaaccgcaatatttaaagtaacctgcagtgcaatatgtgcaaaaatacctgttgcgatcaacgcaccatacaagtccggtgcatttctcgctatgaacaataatctataaagcataaaggcaaacagacacaaaacgagaattgcaccaaacactccaagttcttcacagataaccgcaagaatcatatcattctgtgcctccggaatcgcatgcagcttctgtgtactgtttccaagtccttttccaaagaagcctcccgaaccgatcgcatacaatccctgtaaaaactgatagctgtctttatcagcattcgcctctggattcagccatgcaatgattcggcgcatacgaaagttatcgctttctgcaagtgtatatttcaaaaaaataattccaatgattcccacgattcctgctgcaattactccagcaacaaatggtttggtcttcggatgtacaacaaaaattaaaatacatgtaattgcaaacacaataattgctgtactcagattatccgttaatagaaaaactcccagtgttgcaacaagaccataaccaagcagaatcttaattccatcccgttttttcgccttttgccccaagaggcagatttcatatgctataaatagaatcaccgcaatcttcgtaaactctgccggctgcaatgacaagccaccaggaagcctgatccaccttcttgctccatttacagtcttaccaagtggtgtctgcaccaatgccatcaaaagcattgaaaaccaaaaaaattcttttgcatacgcaccatacagatgatagtcaatcttagaaacgataaacattgcaagaaatccgataataccgataattgcctgccttgtaaagaaaaacatatcattattataatcattctgtgcactgtaggcactactgctataaagcattacaagcccaaagcacatcagaaaaataattacaagaagtagatcataatcataataaagtttttctttttctcttgtccttttgcgttttgtactcgcagacatttctgccctttgccctttcccctgtaccgcagtctgctgagaatacggagaacctgacgttctcacaaccttctgtctctgctctattgagcttcgatacttcctataagcatcactctcatagtttctcatacatactcccatctaaaatctgtatccattctattttttaacattcccaattaataaacagcagatacacgttttattattgaacactcatcgccggatgaaccggttttccatgctcaaagaatctgtcataccatacgaggaagatataaactgtccagatcttacggctgttatccgtcttctcattcgtattctttccgttcttatgatcatcaagcatcttaagcaagagcttcgtatcaaagaacttcttcgctgcatcagactcaaacatctcttttacaatattataatacttctcttccttcaaccatacacgaatcggaattgggaatcccagtttcttcttctccgctgtcttacttctgatatgtcgctctgccgcagcacgcaatgcaaccttcgtctttggcgcacgtactttgtattttaacggaagtgtctcggcaagttcaagtacttctctgtcaaggaacggaactctgacttcaagagaattcgccattcccatcttgtcacccttcatcagaatatcatgcaccagccataaatgaagatccacatactgcatctttgtcacaggatcttttccttttacacgtgcatacaatggttttgttactttttggattcccggcttacatccttttttcaaaatacgatttgcctcacgctctgtaaaaatattcgtcgcatttgcgaaatatctctcttccagtgtctttccatgacgcataaggaaacctcttcccttcataccacgtggcagacagcgttctgcaaacgcacccaggaaacggcgtaccggcatcggtattttattaaaagaagtatgttccaaaggttcacaatatatgttatatcctccaaacaattcatcagaaccttctcctgaaagaactaccttaaccttcttggacgcttctgcactgaggaaataaagtgcgattgcagccggatctgcgaccggctcatccatataatactgaatatccgaaagcttatcccaatattcttccggtgaaatcaccttagcgtcattcttcatattaatgcttgctgcaaattcctttgcatcctgaatctcactgtactttccttcatcaaatccgactgtaaaagtacgatccacctgtcccagataagtcagataactggagtccacaccactggaaaggtaagaagcaacctctacatcactgattttatgcttctcaacggaatccttcatcacacgttctacatcatccaccacttctttgaaaggcttcttacagtctcctgtgaaatgaggttcaaaataacgtgtaatgttcatttttccattttcatatataaagtaatgtcctggctgtacacagaacacccctttaaaaaatgtctcattcgtaggaacaaactggaaagaaagatagttgccaagcgcctcttcattgaacaccttttcaaacttcggatgctccataaatgctttgatttcagaagcaaacatcaatgtaccattcatattcgcataatatagcggtttgattccaaaaatatctctcgctgcaaacaatcttttcttctttgtatcccagattgcaaaagcatacattccgcgaagacggtctaccagtttctcgccccactcttcgtatccatgaatcagtgtctctgaatctgtattcgatacaaactcatgacctgccgctttcagttcttctctcaggtcctggtaattataaatctctccattaaatacaagaaccatgctgcgatcctcattgtacaacggctgatcaccaacggaagaaagatctatgatactcagacggcgaaatccgagtgctgcatcttcatccacatactttcccgcactatccggtcccctgtgtacgattgtattcatcatattaacaagtacctgttctctgtcatcaacttctccgacaaatcctgcaaatccacacatatgccttctccttttttaattactgtcaactgtatatttgttactgttcacacgttgtgcgaccagcaacgcatctcgccattttaaatcgcctttggcgatggggcgagatgcattcaagccaaaacatgcatcctccgtgtcaatcagcggagtgattgacacgggagtgaacagtaacgtatatttacaccagacaataaatctcttttattatagcctcttttactcagggaaaaaagtccctttcatcagaaaaacagaaaaatactgtgagtataacatcacagtatccccattgatcgtatatttaattgttatggtttccccatcaacgcgtatattatatctgatttatagggaaaagtaaagggggatttttgagcagtatttacataaaatgtaaatcagggattgccgtctgacaatccctttcacaaaataaacacttcatcttcattcaaattctgggttgatcgcatagaaattcttactgtcaagatgttcctgtacaattcttagactttcaccaaatctctgataatgcacaatctctctttctctcagaaaacggatcggatcacagatttcaggatctttaatcagccgtaggatattatcatacgtagtccgtgctttttgctctgctgcaagatcttcatgaagatctgtaatcggatctcctttcgattggaaatacgttgcagtccacggagctccgctggctgcctgtggccataatgccagtgtatgatcaacataatacggtgcaaaaccggaacgttcaatttcttccggtgacaaattctttgtcagctgatagataattgcacagatcatctccatatgggcaagttcttctgtaccaatatcagtcagtatccctgttacctctttatatggcatcgtatatcgctgtgaaagataacgcatagatgcagctaattcgccatccggcccaccgaactgacttataatgatcttcgccagtttcggattcgtctgggttatcttcacaggatattgaagtcttttttcataattccacataaatcagcatcccccttcctgccacggccatggttcattgatccaattccagcagtcactgttttcgctgactgtatctacagttaaaggtccatatacctctgcatattctttgagtgcttcaatacgtttctctttatatttttgaaaatattcaagtgctttctgattttcagggtgcgtatctaaaaataatttaacatcatctactgcaaaacttatctgatttatatattcaaaaagttctcttcgattcatttcatgacaattgcaactcatttacagcatcctccttttccacgaaatggtttttcaagctcttgaaaaatagttccacactgaaatccataaccgagatcgtgaagttttctccactgctgccatgggacataagccatcgcaaccgggaactcttgcaaaacatccgttttgctgtaatcaccaacacactcatcgcaacagtaatttttcgacttctgctccggaagtggaggaactggaatattgcaatgaagctgtctttcattttcttgccttgtttgtgacctgtaatttccattctgacaataacagttcgtattcctattagaacaatatggtgccataaaataaatccttatatcttttttgttattgtatggaagataagaaaaattgtgaacaacaacaaaagggattgccacgtgacaatccctaaacataatacattcacttaaaagtagttttatttcgcacctaatgtttcttccactgttttctcttcatactctccattactctgtggaatctgaattgtcagcgacaccttatctcctttggcataatattgaagctgttcctgaagatcatccatgcttgatacggttgttccgtcaattgctgtgataacacttccttttgtcattccggctgcctctgctccaccgccttttgtaatttctgatacataaacgccttccggcatattcagctgtttggaatattcagccggcacgctcattcctttgatgccaattgcgccctgatctttttctgcaacctttgtctttgttgcctgattcatcagattctggatcagatcggatacatcactgattggaattgcatatccgacaccttctacagaatcaccaaccagcttggatgagttgattccaatcacttcgccacttgcatttacaagtgctccaccactgtttccaggattaatggctgcatctgtctgaatcagtttggcatcactctctgttgtctcaccagtctgctcgtttgtttcagaaacagaacgattcaaagcactgattacaccagttgttactgactgtccatagccaagtgcattaccgattgcaatcgcaggttctccaacctttagctgtgtggaatctccgagtgttgctaccgaaatttttttcatcgtatcatctgaaatagagtcaagcggaacagccacaacagcaatatcatactctgagtttgttcctttgatatttgcctcaacacttgttccatcatcaaacgtaactgttaatgtatcgcttcctgctactacatgattatttgtaacaaccagaagttctgaatcattctgggaaataatgattcctgttccagcactttcgctctgttgctgtgacacaccaccaaagaaatcctgaacctgctgcacactcatatttgtaattgatacgattgatggcattacattttccacaatacttgaaacatctgaagttacaacactggaagatttggataatgaagcattgctgctcacagatttggttgccgtagtattagtcttcgtcacaccggtcaatcccagcactttacttccaacaacatttgatgccagaaatgtaccactggaaacaactccaaacaatagtgcaaatcctgtcactgccactgctttgggaattttcttttgcggcttcttaccatgcggtgcttgatgcttctgaccaccattgtcatcatgaaatggtgtttcgctctgtccgtttccattcattccatctgaattataataattatattgattctccataaagattacctcttctctcgtttattctttttctttgatgtttacatagtaactccgcattgtgataaatctgtgtataatcaattaataaagattgaaaagaacgatagaaaaacaggatcagaactttcttcttgaacagttctaatcctgtctatatgttttcaactacctaatcagtatctttcatccttctcttaaacttacagatcaatgaaatctacatcataatcatctgatttttttcctttttttgatttcttagcggattttcctaaatttcttgtattccctgtcggcgcatcataatcatcgtcataatcatcatcgtaatcatcatcaaaatcataatcagcatactcatcatcaaaggcgtcgtaatcatcattaaaatcatcatcataaccatcgtcataatcatcatcttttacttttttacgtccaaacgcctttctgtctgacttcttagcagcaaccggctcgtcatcttcttcatcttcatcttcaaaaggaatatcatactcgtcatacaaatcatcaagttcctgatttctatgcacaagttttactgcaaacataatcataagaacaagtaatacaactacgataagtgctcctccagccagaagaacaattggatgctcttttacaagcgactccagttttccaacaatcccttttgcttccttctttgtactgtctgttgtctgaacatctacactctgataagttccatcctgtgaatcatactgatagaaccctttttcacctgttcttgtattcactgcatacagaagatcataacgatcattctccgggtttgcccaatatggatatgtctgatctgctactgtaagttccccttcctggtatgaatccggaagttttgctcctccattatctgccaaaagaataatagatgttgtatcagaaatcttcaattctgtatatggaacaaatgtagaatcgtcctcattgtagaggaaaaactttccttctccggaagcatctaccaaatatccaagtgtaacaccagcctcattagcaacaaacttgtgctcttctccattgaatgtctttgtagtctcactatatcctaccggaatcgcagatgttgcaaattcttctgagaagttataatctgttccattcacatttaccgtaatatcagtagctgcgccagttgattcacttccatttgcctcaatctctgttgaaccatcatctgcctgtccaatcttaattgcggaagatccctggtctaatgtcagtgtctcatctgaatacagataagcctttgagctgtcaactgtgatcgttgtatctcccatcttcaatgctttaaacgtcattgtagtacgaagttctttcgctgttccgtctccgcttcctgagtatgtaagcttgccatcactgtctgctgttacaccctctccgctttcaaactgaagtgcagaagtatcataactcattgtaatatctgcatctccaacagctgaatttccagatctcacaacaagatctacacttacttcctctccaacctttgtctgtggatcagagaacatcagagaaccatcagctgcacttacaattgtgctgaacattggcactgtaagacacagtgataatgctactgctgctaatttctttgctttcatataattaccccttcttttgttgtcttaaacttatataccatcctattgtacactgtttgaatggagttgtccacccggaagcgaaagaaatcttgtatgaatcattatttacagatttccttttttccttgaagctattccaatatactatccgaaaatccactttctgaacatttcgcagattatcttaaacgatttcaaaaaataatatgtataatggttcacaaatagcatatacggtttttcaaccaatttttttcgaattaaatcaatcatagtacaagaaacatataaaataaacacaaccaaaattgaatataatatcagaaaagtactatcctgatattgattgattttaaagatattcgtccataaataataacgaatataagaactgtcatgaattaggtataccccaaatgttgctgatgcaatcatattaatccatttatgatagttcattttcaatgttacaaatcccataaaaagtgtaatcgccatcaacaaaattggaagtctctctatttcaaaaaaatcaattgcatgtgttgaccactcctctttttttgttccaagaaaaagaaacgtcgtacttactgtatatgttataattaacaccataaaataaagagaaaaataatgtttcgattgaagtttctgattacctccatacaaatttacatatcctgcaattccatataatgttacaaaccacaataatgaattactctcaaataactgagttgtagccgtaggtatgattgaccagcacaaaaccatcatcaagatcaagtactgatattctgtcttactcaacccatgcaacagtttatttaaaaacggatgtattaaatataacataaaatatgtacttgcaaaccaccaacccggatacgtgataggaagacaaactttaatcaattgctttatctcaaaagcattcaatcgtaacattaccgataaaagatatgtcataattgaataaaaaacaacctgtccccaaaatttcaaaagttttttaggctgaaataacttttctgtattttcaatcagaaaatatccagaaatcaatacgaaaatatctacaccaactttcccacccatgagaataaaatcataccaaagatgtggaagtgtaacctcattaaaattccattcaaaatttccatgataagcaaaatggtgaaacatgatcataatcatagagatgattcgaagtaactcaattgaagtattacggttaattatctttgtggattgaacacttttttccatattttcacttcactccttccattcatatctataactaatatatttatctcattttcactttgttcttaaaatccccttcaccctaagtacaagttctttgaactcatccggttcaaccacataatttaccccaacaatagtaaatacgcttacagccaccattccgattgcatagagaaaccatgtgataaaagatgccatgttcttaggaataacatatgttccaacaatacaaagaagtgcaacgacaagtacatttctaaaaattcggaacatagatttttttgcacatccttttaccagatgccgacttgtatagaacacaatttcaaaagagcgatatccataagaacatactgtaccaagaagaactcctgccatgccgaacttccataccagcccaagagaaaccgtgatatttatcactgcttctaaaatcgcctgatatctcgtttctttataatgccctgctgcgcagataatcgtcaatcctggaatccttacattttgcataaaaacaattactgtaaataaaattccaagaaccggacgcacatactgtacatccgtcaggttaatggtatataccccgacaaaaggcaagattaagactcccatacaggcaatcacaataaacatgattacaaaatacatatactcataactagaatagctcttctttaatgtctcttcctcattcttggcgatcacttctccaaatcctgctgtcagaccattcgaaaaagaggtcatcagctgattcactgcattaaccaccatcatataaattccatacacactgacttcaagaagagattttgcccccagacaaattgtcaacactgttgtatctgtattatttacaataataccaacaacctgatgaagcagtgccgcgtttttttgctttaacgcaccttcattcggttctgcatggaaatctaatgcaggatattttcgttttgcatagattttaaccaatacaagacgaagcatatacacaccagttgcaactgcctttacaaaaagaacacctgctccaatataaatcagaaaaatagaaacaaccatattaacgattgttcctgctgcctgaatcagtgcaaccacatatccttcctgatttgcagtcaataaaactctgtatttacccagaaaaaaataatccactaaagtacttcctgccaaaacaagtatcatccaacgcacaagactattttcaagctgtcctgaaataaaaaacggatagacacctacaagtaccagtgtcaatgccagaaataacattccggatttgttataaaattttcttgacgccgaaagaattgaatttacttcttccgtctgattcaatgcaagaggtgtatagagagcaacaactgttgccgttcctactcctgcttctgccaggcccagatatgttaaaaactgatttactgaagtgatcattccattcacactcgatccatatgcctcaagaataaaacgtggcaatatcaatccagacaaaagaacaattacctgtaaaagcagacttgccaccatgttttttaatgcctgttttcctctcatgagatttcctttcctctactttttcttttcctcactcatgaataccatcttcctgtacaagcccgtatttacgcacaatacaacagatgaaatctttctctttggctgaaaatatggatttcgcaggattgtcaggatatgcccgcgaataaagcgtttcaagtcctgatatccttctaacttcttataatcctcctgtaatagcatcttatccagaacaataaagcgagaccagatccagaggcactctgcctcctgtgttagtgatggaaatttttctttcactacttcataattctttgtatatccatctattatgtcaaatactttcggacggtatgcctttccggtaatactgtcttctcgatgaagataataatacttcggctttgttcctactgccactttcttaattcgctgcataaggtctactgtataataaatatcttcatacaatcttcccttcggaaaacgaagatcttcgatacagcttttccggatcagcttattccatatttctccacggatcgtatgccccctgaggatacagcggaaagcctcttctcctgtgcagacaaaatccacctcttccttttgtgcctcgattctgtctttatacacttcatataagccacacgttgccatatctgctccgctatctttgatacgtgtatacatatattcaaacatatcattttcaatatagtcatcactgtctaaaaaaatgatatattctccttttgcatagggaatccccgcatttctggcatcactaagtccaccattttccttatgtatcacttccactcgattgtcctgttttgcatattcatcacatatttttccacactggtcgggactcccatcgtctaccagaatcacctgaatatcagaaaatgtctgacccaaaatggaatccacacactttcttatatatggttcaactttataaaccggtacgatcacactgattgtcggcatgatatctcctccattttattcatagtatgaaagcaaagtctgcgcagcgctttcaatatcatatcctgcttttgcaaatgcctgcctgattcctgaattttcttcttcgctcctgtcttctcctttgtaagaaagaataacacggctccattcctttggtgaatcctggagtgacagaaatttcactttttcaactaacttcacttctgttgtaatcgtatctgccattacactcctgattccggacgcctgcgcttctaacgcaacaataggaagtccctcaaaaagagatgggaatacaaaaacgtccattcctttccataattttgcaacatcttttctgatccctaaaaatctgatcctatcttctattccgtattcctcagctttcttttggatcatttcctgaagttctccttctccaactaacaaaagtatagcttcttcacaggcagatgcaacctcacgaaagatttctaagagaaatttatgattcttctgttcttcaaaacgtcccacatgtccgagcacaaattttccttctactcccagttcatgacggatctcttcacgttctgacaaactgaaagcaaattttttcagatcaagagcattgtggataagatgataattgttactctttctgatcttttttgaaaagagccattctccagccaattcactgcatgcaaaatactttgtagcaaacattggaatcaacggtcggttaattctgtgcaacaaatttctcaccactcccggagtcgaagaattatgtgagtgtgcgatcactgttggaacctttccatagcttgccacaatcagcggtactatattcgctgctgacagcatatttacatgaactgcatcatatcttccaattcgaagtatctttctcatttgtctgctgaacttcaatggatgttttcttgcatcacacgtatgaaacacttttcctccaagtgacttgatttcttcttcatacgcaaggcgtggaaacatacttataaaatcaaatcttactccttgcttactcaatttcctataatatgtcatcacaaaactttcaatacctccgggattaaaggataatccaacttgtaatactttcatttactttccaattacttcctttccattgtcagttcatctatcagattcgtccactgtcgataaatctcttctttttcaaatttttttacacccgatatcgtatgatttgaaaacgcaattcttcgttcttcactatccgtcaacaattctatacgatttgccatcttgtccaaatcataaggggggattaaatagccatcctttccctcctcaacgatttctcttggccctgttgtcacatcaaaactcaccataggaagtccacttgcctttgcctcaagcaatactaacggcaatccttccctgtaagatggtaataccaaaaatgcatattcattatacaacttatacacatcttttacattccctttctgaatcaattgagacgttaaattgtattctaccaccttttggtgtatctcgtcaaaagtatctcccgtcccgtataaatgccattcccactcaggatgagaaggcaatacttttttcgccacttctaccagaagatcatatcccttttcttcactgaatcttccaactgtgatgatttttctcgaatccgctttgtatttctttcgcatagtcaggatttctggtttgatccaattatatatacttcggattttctttggatttatatgaaattttctaatataatcctgtctgttctgctccgtcaatgtcactgtacaatgtgaaattaacgaatcccagaaacggaaaaagcggatatctttcttctcccattcattcatcaatgcaccatgatcgcaaaacacatactttgctttcgtaaaaaaacgaaccggtgaaaccgtcatagcaggataattctccataaggaaaactacatctatttgattttgtctaacaaattctctaaatggttgaaatgtcttcttaattctgtcgcgtactcgacactcttcttctagttctgctctgtatgtgattctcggatccaggtcatatggaacatgccctccttttccaaaaattgcataaatatatacttcatattctttacaaaactcattggcaagagttgttgtgacttgctcaactcctcctgttactgtcatatcataattaacaaaacatatttttttcattctgaatattctccatctgcatagtgaacaatgaatatcgttttactaagaaggcgcctattgaacttacaatagacgcccaaactattatttctttaatatgtttgcagattcttcaccattttttcaatatcaataccatatccttcacttgtagcccagccatatccatttggattttctttctgaccaagccattccacataaggagcgcttcctcttgtaaccaatgaaaatcttggatctacgcattcattctttaatgcatctttggatccatatgctttcaaatgctgaatctgagctcgtattccttcacgtactgtagtaaatgatgctccggcaacgccgccaccagttgttccaagtcctgcaaaattattctgttcaatcttaacatcaccaccaaatttaagccatgcagtctctttcattgcctgtgtaaatgcaattgccccattgattccttccgcattcgcttcttcaacgtaaatctgacagaacttttcaagtgttggcgcatccgtctcagcgtaatatgccggatatgttgcacccttagccttaaaatatttttccatctgggatgcagtcacagtagtctttccagaaatagccatcaactgatctgtagtacaagaatcatccaatgttccattggttcggaaataataccatgtattggatataaattgccatcctgtctgcatcactccgtttttatccaaataatatcttgtttttccaaaagaaatccaaccggtcatcatgtagccttccggcataaagaaatatttctttccgtcaattgtctgccagcctgtctgcataattccatccgtattaaaataatatttctttccactgattgtctgccagcctcgtaccatttttccgtctgatgcaagataatactttgtacttccaaagctgcaccatcctgtcagcatatgtccatccggcatcagataatatctcgtctgaccaaaagaaatccaaccggtcatcatataaccttccggcataaagaaatatttctttccattaattgtctgccagcctgtccgcatcactccatctgtgccaagataatatttcgtgcttccaaaagaaatccaaccggtcatcatgtaaccttccggcataaagaaatatttctttccatcgatcgtctgccagcctgttactgctactccattttcattgtaataatatttttttccatttactgttttccaaccacgtttactctctacaatcagcttaccgtcagaagcaaacgtatacgttgtcccgtcaatcacctgttttcctgtcaccatcacaccattagaatccagataataccttgtcttaccaaaagaaatccagccgcgcatcatatagccttccggcataaagaaatatctctttccatcgattgtctgccagcctgtctgcatcactccatccgtactcagatagtatttcatctgtccaaaagaaatccagccacgcatcatatagccttctggcataaagaaatatcttttttcactaattgtctgccaacctgtctgcatcactccattcgcatccaaatgatatctcgtctgtccaaaagaaatccagccacgcatcatataaccttccggcataaagaaatatctctttccatcgattgtctgccagcctgtctgcattactccgtttttatccagataatatcttgtacttccaaaagaaatccagccggtcatcatataaccttccggcatgaagaagtatttctttccattgattgtctgccagcctgtctgcatcactccatcatcattaaaataatatcgttttccatcaattgtctgccaacctcgtaccatctttccatctgatgcaagataatactttgtacttccaaagctacaccagcctgtcagcatatgtccatcgggcatcagataatatcttgtacttccaaaagaaatccaaccggtcatcatataaccttctggcatgaagaagtatttttttccaccaattgtctgccagcctgtcacccgatatccatttgcgtcaaaataatatctctttccatcaatatctttccaggaattagttacatattttccgccttctttatatttccatccattggaatcctctacccaagttcctttttccttagatactcctaaatactttgctataccagtagcatccgcaacaccgagtttttttaacccagcttcattattcagatatgtatttacatcgcctgtattcgttacaaatgcatgttctactataattccaggaatattattttctttcgctgcaatctgaaccgaaaaataatctgattttgatccatctggatacttttcatctgccagtgttgtatctttactataaatagatcttttctgcaaaccaatcgcagtcagctcatccataatgtcattcgccagctcttttccctgctgtgcaacttctggtttccaactatcatttggtacaattacttctgcaccttttgctgaagtcgatgtagaagaattcaaatgaaagctaacaaatatacttgcccctgcttttgcagccgcatatactctgtcactgatatccccaccactgttcttattgcttggatatgggcatgctgctgtcgttcgtgtcatgtaaaccgacacattcgcatacttttccaattcttccttacaatattgtgcaatctttaaagttaaaacttcctctcttacaccattcgctcctgctcctgtgtgtgttgaatcatgtcccggatcaagagcaaccacaacattctcattgacagctctcgaatcatctacagctcttgcattatcctctgcataagtctgaatatcttcatccgaatcatattcttcaacttccgctttctccaatgcatcttctatactggactcttccatcacatttccatcttcatcaatactcataacagcaacatcatactgctcctcatcagttgctgcttctgcatccggttgtccttcaatcggctgtaattctgacattccttcatatgtttcattaacaccaaattttgcttccattccaagatccgacagcaaataacttgtttccatctctgctgtctttactgtcaatttggttattgtataaattccatcctctccatctgcatatgccttctcatatagaaagacaccgtcttctgattttacagaagtccatgtttgtgtatccccattatgttctacacttaaatcaatctcttcaatattttctgttccatccccccaggaaacaacaagtctctgtgttgccggagtttctacgtacggactttctatgtacaaataattcaggtgctgctctattgcattctgaacttgattttcttctatctgctcactgtctgatggctgattttcaactgtttctatatttgtatccacttttgtgtccgttgcataaaccggtactgatgtaaccacagttgctgctgctaatattgcgaccagacaagttcttatttttgatatcattttttcctcctacttattttctatgtttatcaattgctcttatttccatcagaagtgattcatgtatccatctaactctgtatcacctgtatctaatgcctgtccattctctgttaatttaagtttctcacagttatatgtatccaaataggagttcacaatacatgtaagtatttcatctttccctgtggtccccatacttctgatacgttcaccaacttctgtattcatatccagatctattgttttattattctcgtcaattttacaactgttcaatttacaaccttctgtcaaaatacctttttctattaattgattccaaactgttgtatcatctatgttttctgtcttcatctcttccgaaacgatttcagcattttcattcacatagtaaattttcaacgtcttcatctcttgcttttcttctgaaatattgcttttttcttcctcctgtttttgattatttttttcagaatctatcgtttcacttgtatccttattgcctgaatcctctactgtagtattttgttctgtatccacattgtttttctcacatcccactgaaaaaagcaccatacttgtcaacattacaactactaatagctttttcatataccttaacctcctcttgcttattgctccccacagatttctctatgataataacacaaaaatgcgtttaaaaaaagactgattttccaatcagtctttttctataacatgttattttaaattatttgtaatatgaacttggaagctgttctgtttttactgtttttccgtttttaacataatctctataagcaaccgctgatttgcttcctgtactccatgatcgtacattaacataatcataccaatctggttggattccccaaacttcagcatacaatgtttttccactgacatatgtcaccagtttcaccggataatcatagtcatttctgaatttcaaatctgatgatccataatctaccattgcatcctgaccgatcggcacatatgtagatggaacagaatggtttcttctctgaacaattgtaagtccggctcttattgctgctccgtaaagcgttgtgctcgcctgacagatacctccgccatatccaacaccacctacaactcctgcctgcttatatccctctgcttttccacatggccctgccacgccaaaaaatgaaagggtctgtcccggctgaatgacaacctgattaaagctctttaatgctctactcatattatatgtgccgttttcattatttgtagacactgtagagaatactgacattctatccacataggctggagatgttatccttaagttcaatgttaaaatctgactttccgaatccagtatatctacataatatgtatgtgctccatttcctgagaacgtaaattcacatgactttttagtagaataattttgtaaaactttgttatttccaccatatacttctctgaaacgatatttgtgaacattatcataacctccactggaagttgctgtcaactgtattttttgtccgttttttgctataccatttgtattacttacaaaggaacctcttaactgattatccggatgtaccactacctgcattgtgtacgttgcacgtaccacctggccttcatcatcttttacatccacatagaaaatatgtgttccaatccccgtcgttgtaaaagaatatgtgtttttataactataactctgtcttacctttgtagttgctccatacacttcagtaaactgatactgacgttttccgtatccacccactccactgccagttaatgtaacagttctttttgcatattctctcgttgttttattgcttctgagacctgcttttattactttatctggatgtactacaacagtcatggaatatttgagttttgtactctgattctctttatcctttatatatacataataagtatgcgttcctggccctgttgtcttaaatgaatacgtcttcttttcactatacttctgaacgacagttacttttccattataagattctacaaactgatatttaaatgaaccataaccaccttttgcatttgctgttaagcagatatttctatcgatatattcttttgtcgtcttgttacttgtcacattacctgtcaacacattatccggatgagcaacaatatccatctcataagatgctctagatttctgtccctgttcatcaatcatgtcaacataaaacacatgatgtcccgttcctgaagttttaaaagtatacgtgtttttctcactataagcctgtcttactgccgttgttgatccatatgtttcagaaaactgatatttgatctttccatagccacccttggctgctgctgttagaacaactgttctttgtatatattctcgatttgtcttattcgaactaagctctgctgtcaatttcttttgcggatgcagtacaactgtcatcgtataggataactgtatttcctgtccctctgcatctttaatgtaaacataatatgtatgttcgccacattcctttgttataaatgaataggtatttgtgtcaccataatcctgtaatgctgtttctacaccgtctttcttctcagtaaacctgtactgataattcccatatccatttgttgcttctgcagttaacgttatctttctgtctacatattctttttgtgttttattactggttaattttcctgaaagaactttcgatggatgtgcaaccacctcaatcttatactctgctgatcctatattaccattttcatcttttacatttactcgatatacatgttcaccaacgccagatgtcttaaatgaatagactggattttctgcgtattcctgaacaatagctgtttctcctctatattcttctgtatactggtattcaacatttccgaccgcatcctcgacatttgttgtcaattctacggttctgtccacatattctcttgctgttttattactgacaattgtagtttttaattctgtcaccacttctgttgatggtaattcttccgttgttgtatcttctgccgctctttcttccggttctgtttcgatcggcgattcttctgaattattttcatcttctgtctcttgaatcagttctgtattttcaccatcatctttctgtgtgccttgatcatccaaaaccgtttctgcctgttccacctgttctgctgacacttttaacggtattccagaaaaatctgccataaatattcccgcacataacatcaaagccatccattttcttcgtttcataccttttcctcccctgcaaatatttatagagctttttttcttttcaaccggtcaaatagctttgtcttataacaaaacaacgttccaccatagcatacagcaatgcaaagccaaaattgaatatacacaataaatgttaaccatccagttgcttccgctcgtggaataaagaaaatattttgcaatgagacaagaataattgtactaagcaacgctctttttccaaaaccatataccatatatagtaaaataattcctaaaataatgctgaatataaaagctccaacatatccaaaatcgaaccatgtctccaccaaataattggatcctcgtccacgaccattcaaataatcttctttcatgctcaaataagaaagaatgtgagaaagattattgctatgaagggcattaaattcactatttgccgacgtcaagccttctgtatgaaaaattttctgtcctatacttcctctataaatatagtctataatatctccaaatgtaaaattcaaatgaggtgatagtctgattccttctcgatatccatatgctattgctgtaacgttaaatgtaactccctgaccatagaaaaaatcggcaattaatgttaaaaagtttccggttacaatctttaagccactacgtatatatgcgtatactcccataaaaataattaaagctggtgtacatatagcaaggagtcccttttcaatttttccgatccatttcttatcatctactaaaaaatctcgcagtaaataataagataatacaaacaagagacttaacattgccggattccgtactcctatcagcaaacttggaatcgtggaaagaacgtataagctcaatggaataaacgtttttttcttttctggtagtgtagcaagaaatacacatatactataacgtgcaaaagaggccaatgtatgaaagaaacctggcagactactggaataatttgtgtaataatccaagtaatttccagttcctattttaatcaaaggttcaaattgctcaataagataaaacaacattgttacataaaacacaatcattgaaacctttctgagattactgacaaattctgctttacaaaatatgctatctgaagaacgtgtattgttttctctgatttttatatgaaaaaactttataatgttagcaccaatataaagcgcagtctctgtaataacaatcaaagttaatgcaaaccaaatattttcctctttctgaaaactttcttcccaccattttctgcctttgcacattcctataaaaggtctgctgatttgaaatgtaaaaagtgtaagttgcatgaaaaaatataaaaaattttctttaaagttttttatactgaacaggatattcatacagaataatatcatgattgccactaatcccagattaaagagattttccactcttgataccaaaaataacacagatcctattacaaatagtaaaatttcacatataaatataatctgctctttctgtttccatgatatcttctctttactcatttttatccctcttaatcttccttacccaaaatggcatttctataattccaattaaggttcctactccatatgctagatgcagtgatagaaatattaatggcaacatcaaataataattgtaccacttttgcctttgaacagctaacactgacattaacaaatcgacaatcacatatagtatgcataagcaaacaagcattcctgtgtttcccaacaatgctataattcctgttaaaatcagtgcaaacacaaatgccaaaggaacaaaatgatgaatagaaaagcatcccggacaaactccaagcgtcaagccaatccaatgcccatttccatatttttgttttaacattccacaccatgaatttctaatattctgataagatataatatctggattaaaacaaattttatatcctgcttttcgaatacgataatgcatttcattatcttctgttcgtcctaaattttcattaaaaagccctgctttttcaaatacctctttgcgatatgctccatgaaaaacagacttcacatacgttttgtgatttcctttacgataaggtgcaatactacttccaaacatagaagattctgccaacaacaatgtatgtttccaaggggtttcttcttctacgacgttcggtcttctacctcctgtcacattctctccactcaatatacattgaacatttttagatacaaaatcgtgcgggatcattgtatgtgcatcaattcttaaaataatatcgccctttgatgctgtaattgctacattccatcctgctgcctgaattttctttgcattatccaaaacaacaactcttctaaagccatgatcctcttctgaaaaatgttccattttccttctcgtttgatctgttgacattgcatttacaagaatcacctctatatttccatgtggataatcttgtgcaataatatctttgaacaacgaatcaagtgctttttcttcattatatgcaatcacgcaaaaagaaactaacatattctctccccttgttatataaaatctgttatttaatcatataaacactttttccgataatatacccagtataccactcctgatactacatatacaaatcctgttgcaattccagctccccagattccaaattgactgattgcaaaataagtaatgattaaatgtaatccacaagaaattgctgccattattgcattgaattttgcaactcctattgccggcagaaaattcattggaaccattctgattcctgcattcaacgcatatactatccaaaaaacagttgataaagcagttgcatcttcataacgacttccgtacacaattcttatgatatacggactaagcactgctcctgcaacagttatgataccaataactcctgctgtcatcataccaactttctttgaaatattccacacttcttttccatctgatgcttttgcaataatagtaaaataataaataataattgattgagtcacgaatgacaactgaccgggaatcataatagcaattttataatttgctgttattgtttcattcctcagtaattcattaacaagtgtcatctcgttgattggcataatcagtgaaaacagattagaaagcattaatgagatagacattaccataaatgcctttatctgttccggactcagcttcgccgctttctctttagaaatatttctctttagtgctgcccatacagatatgattgcaactatgatcgccacgtatctggcaaatgcaattcctttgataccaatcaataaaacaaaacatacactacatccaaatacaactgttgtctgaaccacagcggcacgtgcatacgcctcattctcgctatgtgctctcaaataactaagtactgtagccaatatattattaaaaacaggataaagcaccagtacatatacaacgctacgcgcattagggaacggaatcgaagttaaagctacataaagtactacaatcaaagataagatagcttcaaatagagttccatatttcattgcaaattcaaaatatgctctatcttcctgttcagtatctgccgccgcacaatatttaagaatcgacgatgtcattccgagaccggcaaatgaaactacatagttatataaattatcagcatacgttaaataagcataatctgtcttgtcaactaaacgtacaattacaatacttgaaacaaaagcaatcattttcacaagtgtattacctacaaaaatgtgaaaaaagcctccttttatcaaaccatttaacttactttttattttttctcccataaacgaactggcctttcaccttttctgatattcctgtgatatacctttgtatctttccttctctttcaaagaagtaataaattgcaagtaaaaacagtacagttagtataagatcaaagctatatacaaaatcacaaaatccaccttccaacgctgttcctaatttaattgttaaaacagctccaagtgccaatgtagaaggtgtttttttaagtttcataattaacaaaactacgagactcaaaataagagcaacccaaatcaccgcaaaaatcacacctttatatccccaatttgcatatgcttcacctgcaaaaagagcattcattactccggccgagccatcatacactttttctgatccataaaatgccattgtcagttttgcgcttctcaaataatcactgctattcatcccaattaatcttaaaattgtcggagtaaagctccggcctccaagaaaaccaaacactgttgggaacaaatcaaaacaatatgccagggttcctacctgtgtaaacaaagttcttccaagcggtccattataaatgtcaaaaagcgatccagaaaaacctgtatgaaaataaaatgctactataattactgccataaatgcaacagatataatcatataaatcatcttaatgccacccttataataaattaacataattataaaggctgcaaaataaaaaacaaccgatgatttttcaaatttatatgtctttataataacagaagaaataaatagagcaattgtgataattgtccattttattttctttgttttcagcatgtatgcaaatgccacataagaaagcagcggtaccatcatcagaacaaaaatgttgcttaaatatggatgtataaaataaagtcctcctattctggttctctctgtcgcaaaatcaaaatccgctgacgcatgaatcaatttcaaaagcggaatatatccaatcttcgccaaaagacctatcaacaagacgatacacccaattgaaagcaatgcaaaataaggaaaaatcaaatcttctttttcacattctatttctttctttaagtactcctgatactgtttcttcatgttgactctgaacattttctcccaaagcaaaataaatgccggtaaaataattgcaattccaaaaacaactacttctgtaatcatacagcttttatcacgatttaacagatatcccagtgtatagtgtttgtcaaatcctaataaaattaaagccgttcctgcaaatgtctgtaacatgaaaatataatatatatatgatataacatttaccttaccaggattcaacgttcctgctgctttactgaacaaaatcgttgaaatcccaaaaatcaccaatataagtaatatctccaaaatataaccctcaatcatttaaattatactgtttatccaataaatactgctttgttttttcatcaccattcttaaaattacctatcataaaatcaatctgtgatctgtcaaaatcattatccagataaattgtattaaaattatgaagattttccaacacgctaatatccgttatcttcgttcctttcatgcttagaaactcgagatccggacactgctcaattccatttaacccggaatactcattatatgaaatatttaatctttttatattcggacaactttttaaaacatcaaaatcttccaaatgattagaataaatatcgagttcttctaactgttcaagatttcccaaatatcctaattcagaaaatgcattgttccccaaatctaacagaattaaatttgtcaagccttctaactccggtgtttcagaaagcatatttgatgatgcgtacaggaaatttaactgttcaatttttgctaattgatttatattcacaagtcggttctttgaaagatcaagaaatgtcaggctcttcatcttttcgattccttcttgaatatttccgatattattttgctggataaccagtttttgtattttttccaatccgtaaattggtgaaatatctgatatctgattatttgttaatgtcaattcagttaatgaataacattttgataacgctgttatatcctttatttcatttccagataaatcaagcacctggagttcatttaacccttctattgccgaaatatcattcaacttacaatttttgattgtaagctgagtaagtttcttacacttagccagatccgcaatttctgtaatttcctgattatcttctatatctattgtccgcagactgtctaaatcctcttgcgttattttatctttttttaaaatctgttgtagttctttttctatatatttattattaaatactatatactcatcttcttttgcagtgttatggcggaatgataatcccaccataactcctgccacaagaagagctgtaattaacacagaccatattatgatcaatattggatgtcttcgttcgtattcttttagtttagtcataaatattccacaaaattgtctcataatatcttcctttcaatctgttacaagactagttcaaaaaatctttcacgcaattacatactttctctaaatcttccgcattcatatacggatgcattggcaatgcaagaactttcttacagagttcctctgaaaccgaacaatccacatacttctttgtatcagcaaatgctgtctgtaaatgcatcggcttcggataataaaccatagatggaacaccattttcttttaagtaagcctgaagcccatctctttcttcctgattcttcagctgaattgtatactgtgcccagcttgaataaaatccgttcttaacacatggtgtcttaacaatatctgacagagcttctgtatacttctttgcaacttcattaacagcttttagttcattcttttcaaatgcagtaagtttaactccaagaattgctgcctgaagtgtatcaagtcttgaattccaaccaatacgtacattgtcatacttaaactgtccttttccgtgtacacggatagactctaataattttgctgtctcatcgtcatctgtaaaaatagctccaccgtcaccataacagcctaatggttttgccgggaaaaatgatgttgtagatgcatcaccgaaactacatgcctctctgtcaccaattcttccgccaaatccctgcgcagcatcctccaacagaagaagattgttttcttttgcaattgcttcaagtttttcataatctgccggctgtccaaaaaggtctactgcaataattgcacgcggtataagttttccctcatcctttactttttgaattgcatccttcagagatgtcacatctgcattaaaactatccggatcaacatcatagaatacaggtgttgcaccttcaaatgaaactacttctgctgaagcaaaaaaagtgaaatctggaacaaaaactgcatctccttctttgatattccatgccatcatcatcatcgttaacgcatctgtaccatttccgcatgtaatacaatgttttcttccaacatatttcgcaagacgctcctctaattcttttacctgatttccgctgataaaattacaattttctaatacttcagaaattgcaacatccatttcttcttttaatacctgatattgtttctttaaatctctaaactgcatttctatttatccctctttttcacatgttccgatttactcagcattatgtattaactaattttcacattctttgccattatattcgcaaaaacccatatatttatttaaaagatcattaatgtttttttaattttaatccatcagtatgttcttcatattctcgatgacaacattcacatttcaaatcttttccaagaacatttccgcattcacatacccaaccgattctttttgccggaactcctgccattaatgcatgattttttacattctttgtaacgacagcacccgctgcgatcatagcccattttccaattgtatgaccacatacaatcgttgcatttgcacctactgttgaaccttcttttaaaagtgtcttcttatatccggcacttccttttggatatttggcacgtggtgtcaaatcattcgtaaaaaccatagaaggaccacaaaaaacgtagtcctccaattcaaccccttcataaatggatacattattctgtacttttacgccatttccaatttttacatgatttgacacattcacattctgtccaaaagaacagttttctcctatttctgatccactttgaatatgagaaaaatgccagatttttgtgccttttccgattttaacatcgtcatctatatagctgctttcatgtacaaaataatcactcattaaaattctcctgtcatatccagacttgcaaaattctccagtggaagttttacagcatgaccttctttctggctcttataaattgcaagaacaagctccagtgcatttcttcctgcatgtgcatcaacatatggtgctctgtcattcttaattgcatcaattacatctgcataaagacttgtgtgtccatttccatatacattacttgtctgctcttcaagtcctttgtttgcctgatcatcatctgtctcatcagcaaaattccatacatcaatgttatttgtagattttccaccaagcttgactgtaccattctcaccgaacagatataatgtttcctcaagattctgtggatagacatttgttgttccttcaattgttgcaactgctccatttttgaactttacaactgccattccgatgtcttctgcttcaagataatggtggaactgctgttttgttacaccataaacttcatcgatttcatttcccatcatccaacgaagaagatcaattccatgaatacactgattcataagggctccaccatcctgagcccatgttcctctccatggagcctgtgtgtaataatcctgatttctgttccaacgtacatgaatagaaccatgggaaagttttccaaatcttcctgcttcaagagcttttctcatctcctggactgcaacattaaatctattctgatgacacgcagatacttttacgcctttttcctcagacagtttaataatcttatctgcatcttcaatgctcattgccatcggtttctcgataatacagttgattccatgctcaatacagtacaaagcaatctctgcatgaagaccgctttctgttgcaataccaacaagttcgatttcattttcttcaatcatttttttgtagtctgtatatcttttaatacttgtatcattttcaagtccatgttttgcaagaacattttcgatatgttccggtacaacatcgcaggcagctacaaattcgagcttattatttacaacagcttttacatgatttgttgaaattcttccacaaccaattaatgcatatttcatctttatatcctcctacagaacttcaatattctctctgttctcgatattcttcataacattctttgtatcaaagattgcttttgcattcttctgaatcatgtcataatctacattcgtatgtgctgctgttaccatgatcaggtcgtaagaagcaatgatttccggatcaattttctcaattccctgatgtttctctccatgatatttgtactcagaaatccatggatcatagaaatcaacatctgccatctcgcgtttgagtacttcaattacacgaagagccggactttctctataatcatcaatatcctgcttgtatgcaacaccaagaacaagtacctttgctccgttcatagctttcttatgacgattcagaaccttgcttgcgcgctctacgcagtattccggcatctgatcgttaataatcatagatccttcgatcatagatgtatggaatccatactctcttgctttccatgtaaggtaatatggatcaagcgggatacagtgtccgccaagtcccggacctggatagaatgcctggaaaccatatggttttgtcttagcagcatcaataacttcccacatgctgattcccattctatcacagagcatagtcagttcatttacaagaccaatgttgatatttctatatgtgttttcaaggatcttctccatctcagcgattgccggtgaagaaacttcatatacatcaccttcaagtacagcacggtacattgttgcaattacctctgtcgcatctttaccgattgctccaacaacctttggtgtgttttttgtcttatagatcaggttacctggatcaacacgctctggagaaaatccaagatagaaatcttctccgcattttaatcctgatccttcttcaaggattggtttgatcagttcttctgttgttcccggatatgttgtagactcaagtactaccattgttccttttgtaagatatttagaaatagcttctgttgaggcctttacatagctgatgtccggctcctgatgggaatccaatggtgtaggtacgcagatagcgataaaatcaacatcttttacaaaactaaagtctgttgttgctttcagcattccctcgtcaacaagtttcttcagatcactgtctacaacatctccgatataattatgaccttcatttacaaggtttaccttttcttcctgaacatcaaatccgattgtcttaaatccagcttttgctttctctacagcaagtggaagtcctacatatccaagacctactacaccaacttcgatttctttgttttcaattttcttcaataattgttctttcatttttcttctcctttattttaaatctaaaataacctgttttgctctggctttccatgtattagcctcgtatgccgatatttccgattctcgcttttcctgcagtaatgccgggttttgtaagatattatgcaagcattgttttaatgcttcctgattatattctatactccatcccaggttttctttttcaataaatttacctgctgctgtatctttggttgctataatcggtatataatgtcctaaatattcaaacacctttatcggcattgccatacgcatataatcaccttcacctgcaaaggcacagcatatatctgcttttttataatatggctctaatccctgtccactctcatgaataatggaaatcttttcgctcatatatggtaaatacttgctctttgcattttcccattctttttctctgcaacagacataagcatgaacctgatcaggcatctgctgcatcgcctggaaaaatactgtcaaatcatagattctgtcaattccacccacatataagatttctagtttttttgcagtcaaatccgatattgcctgcacggcatcaacatcatattccgcacatcctggcataagaattgcacttctattcaacaattccggatattcttttaagtatgcccgcatttcatctgttggaagataaaatacattaagcaattttttatattgccttaaatcatatctgtacattggaatcgaaaagcatttcttataccatgatacattatcacgatacacagaaaatttccactgtatatctctataaaaaagtccgatttttatcccgtttttcttgcaaaatttaaaaaagctaaaatccaaaaacggataacgaggcaaatgatttttttcagtcagcaaagttggcattgtagaactctctgaataaagaaaatcatattttataccgttccttatattccgttttatcttgtttatttgaacttttctttcagtgccatatcctgaaatatattcaacaagataaccattttcttcaaatgcctgtttcatcttgattggacggatattggagcccgattttccgcttttttcaatatggttggggatgtggacaatacatcttttttcttgtttaatgttcattgtcacacctcactctttcatataaattaagcattttctctacattgtcattccatgaatacagttgttccactcgttgacgtccattatttcccatctttgtgcgcatcttttcatcaagcacaagtttcttcaatgcatcttttgccttatttatttcttttcgagaaataatcaatcctgtttttccgtcttctataacttctttaaatccatctgcatccgatgcaacaacgggctttttcatcgccatggcttctactgctgctactccaaaactctctttccggcttaatgcacaaaaaatatcaaattcgcttattgcttccggcaccttcgtgttaggtattttccctttcaggaaaacagaatcctgcaggttctgcttattgatcagatcttcatactgttcttttttgcttcccgaaccataaattaataatttaattttccttgaataatgctcctgttccaattcctttttcagatcccgaaatgcaagaatcatttcttcgataccataaatttcttctaaagcttttatattccctattatcagctcttctttttctatttctttatactttttcggatcaaacttatttaaatccactccaaatggggtaatcgtaatttccagtttttcatcctgcattacttttttcagttggacagccatacaattacttgttgaggccaaataagaagcacttctcacatttctttttaaaatatgatttttcaccctgctttcatatgggaaatcatatacatcacttccccatactgaaagaatatatttaggtaatcgtgctttcctcgccaatgtcccataaccgcttgcataatgtacgttaatgacatccggatttattcttttggcaatttttctcaattcaccggcatttagataatagcctttgccaccactgtgtttcatcaagtataattttactctcgaattcagtgcatcttctttcggctcatggcctctgtttgaaacaagatacacttcatgtcctctctctgctaatgcattcacccatctaacagtgtgcgtactatttgctgccgatacaaacattattttcatcaaaatgactcctctgttttactatctcgcttctcttcaaaacaaacttatcgttttgaactatcaattgccttttttaaaatccgctcaattttatttgtcagtatctgataatcatactcttgtgcgcattcttttaaacgttggcaatactctccgtattcttctgaagtaagttgacgaaactttgtaatctcttccgcatattcttttccattcgcaaatcgctttgcaattcctaattttttctctcttattaaatcataattcaccggaagattacataaaatcggcttttcactcgccatatactcaaacagtttattccaactgcatccgtatttatttaagcctgccccctgaacattaattatgttcaaatcagcattgctcagaatatacggaatatatttcttttctacacgcccttcaaatttaacattcaatgaatactttctgcactcatcttcaagcatgtctttttctgtgccatctccataaatataaaaatgaatatcctgatttttcaattcttttgcagcatcaaccaatgtctgaagattatttacttttcgaatagatcccatgtaaactactttaaatgcattatcattcgcaatctggctattctcaaggttatataattttttattctcttcaaattctgctaaatcgacgccattatttacgtgatttactttattgatattaacttttttcgtccagcccttatcgcatatgtactcttttccgcccggcattgtaaaaatcaattgatctgcgtgtacgtaaatccatttttcaagctgatacagtacttgaataattggattcattcgagacataccattatattctacaatcgactccggccataaatctcgtacttccacaacaactggtattttatgctttctaccaaataataatgcaaataatgcaacaaataaatctggagaagatgtataaatcacatctggcttttctttcttataaaaccgcttcattgccttccaggttttaaatggaagatccatcatattgataactctgtccattccatttcctttataatcacggcttctaacaaaggtatactctacaccatcttccatctcttctctataaagagatttatccctgatcatattaatatctgtattatgaatcttactggatgtaaagattttcaccgaatgtcccttcttctgaaggtactttgaaaaataataatgcctcaccaatccccccatactcggtggaatggcgtaatgattcacaatccatacgttcattgtgagttctccttcatacctttgttattttataactgctattactgttgctaacatcgtcttgatatcttgccagaaactaaattcttcaattgctttcaaattatatttcatcttttctggcagaatctgttcgatataaacctgatctgcattctctgctgattcaagaagcttgtcttcatctttatattcaatactcgcccttgatgttactcctgctggcaataacagtgtcgccttcatttcatctgtataatgggctacatacttttcaacttctggtctggtgcctacaaaagtcatatctccagataatatgttgagcaactgcggtagttcatctaatctgcatccgcgtaatgcttttcctacttttgttattctggtatcacctttcgtggtaacctgcgttccgattttatctgcgttgttaaccatcgtacggaatttaaaaatccgaaaagtcttaccgtatgtcgtcactcttacttgtcgaaagaaaaccggacctttagaatccagtttaatgcaaactgctagtatcaaaagcagtggtgataaaagcacaagcaacacacctgctactattatatcaaaaagacgcttcagaatcaaacttgctttatgccgctgcaaaatatcataatatctttttacttctttcacttgcatattctgaggcaattcgtcccatctgcacatcttttaaacctcacttacacatttcctaaatgtttcaatcacatactctacatcctcatctgtcagttttgtatggagtggtaaagtaatctcgttttcaaatagtgcataagcattcggataatctttgatatcaaatccaagatttttgtatgctgtcaaaagtggaagcggtttgtaatgaacatttgttgcaacgcctgcttcagccatctttgtaattactgcattgcattcttctcttgtctttccatttaatctgacaagatacaaatgaccacttgacgcaaaatcatccccataatggttcaatacactaagatccagatctttcaatccttcattgtatttttctataatttcttttcttcttgccaaaatcgatgggtatcttctcaactgtacaagtccaagagatgccataatatctgtcatattgcatttataatacggcgcaataatgtcatactcccacgctcccagctgtgtcttagccaaagcatctttagactgaccatgcagagaaagaagcataaactgtttgtaaatttcttcattatctattccgtcaatatctctccagactgctgctccgccttctgctgttgtaagattctttactgcatgaaaagaaaagcttgtaaaatctgcaatttctccactatgctttccattttttgtagcaccaaatgcatgcgcaccatcggctactaccgctattcttcccatctttttctgtatctctgtgctcggacggaataatgactttttcttttctacaatgtcgaatatcttgtcgtaatcacaaatcacccctccaagatcaaccggaatgattgcctttgttttctctgtaattgcagattccagcttttcataatccatctcataagaatccggctgagtatctactaatacaagtgttgcacctacatgtactgcaacacttgctgatgcagtatacgtatacgcacttgtaatcacttcatcccccggaccaattccaagaacacgtaaactcatctctgcacatgctgtagctgagttaagacaaactgccttactcgtatggcaaaatgctgctatttcgttttcgaatttctttgtcttaggtcctgtagttatccatccacttcttaaagtatctgcaacctctgcaatctcttcctccgtaatatccggtggtgaaaatgctatatgtctgttttccatctatctatcctccacaactggttcttcgtgactcgcttttccaagacttaacaattcttcgtacatctcttcatcacgttccttatcttcttctctgatatgatacgtcggaacaattccagatacgatttttttcacatcccttgattcctctgatgcagcaatttcgagttttttcaactcgcttaagaaatgtacctcatcaaattctaacggttgtcccacataaatcagattatttgccgtcttctgtaaaccttcctcttttgtaagaatctcctcatacaatttttctcctggtcgaagtcctgtatactcaatattcatgtccacaccaagagtataacctgacaaacgaattaaattcttggcaagatcagcaattttaaccggctcacccatatcaagcacgaagatttctcctccatgagccaatgcgcctgcctgcattaccaatgatacagcttccggaattgtcataaagaaacggataatatccggatgtgtaactgtcacaggacctccggctgccatctgtttcttaaacaatggaataacactaccattgcttccaagcacatttccaaaacgcacagcaacaaattctgtcctggaatatctgctgaatgtctgaatgatcatctcacataatctcttggacgcccccataatgtttgttggattaacagccttatctgtagaaatcagtacaaatttcttgaccccatacttatccgccgcacgtgctgtcttataagttccaaaaacattatttttaattgcttcattcggactgtcctccatcagcgggacatgcttatgtgcagctgcatgatacactacatctggtcgataaagatccatcacactttcaattctctttgtattacgaactgaaccaataagcacttctaatctaagttttggatatttcttttttaattcttgctgtatatcatatgcattattttcatatatatcaaaaataataagcattctcggattatgtgcagcaatctgtcggcagagttcgcttccgatagagccaccacctcccgttacaagaacgctcttgcctctcacatatccggcaatactgtcaatatcaatcttcacagtatctcttcccagcaaatcctcaatagaaacttctcttaattttgagacacttacctcatcattgatcagctgatacacgcctggaagtaccttcagcttacaggttgtttcattacaaatacgcaggatatctctggtgtctttattatcagcagatggaattgcaagcataatctcatctacatcatattttttcgcagcctctttaattttcgtacggtcgccgacaatgcgtactccgcgaatatattttccggtttttgatggattgtcatcaattacacacacaacatttctgtttaaatgtttgcttgttttcatctcggtgattattatattaccggcttcgcctgctccgatcaccattgtattgattggacgatttgtgttctttgagatacctctttgaagagcatgcaaaatacgataagaaaatcttgtgatcaaagttgtcattgtcaagaaaaagaaatagaacaaatgaaaacttcttggcactgtcaaataaagcagactcattccaaatgcctgaaatgctgttgataaaattgccgctgcacaaacaagtagcgcctcataaagacttgcatatgaccagactctattatataaattcaataaaagaaagatgatcattgtagtaactatattaatcaacaaatacgtattaacacttgccaaatcttccacaggaaccgtgttcccatccattttatatctaacaatcaatgccagataagaattcactataattgtaatgacatctacaataaatagtaatatcattcttgattttgatgtttttaagctgaatatatttttcatagaaatcctctccattaacaatgttacaaattattacaagttttttacataacttatatattatcaaatttcattccattattcaatgtctatacttatttttttcataaattgtgcaggttttatatttctctgcattacgtttttgaaatcattaccaatcaactttaaaaaaggagacgcttcttactatttctgcgcctcctctacccattcttaatttaatttttctccttcggtcaatatgccgccttcttcaacaacattcaccaaatcaataatattctgcacagaagattcaatcggttccataataaagagttctgtatctccactggaataacaagtaccttttgtattcgttccttctgctgctatagactggattgtccatgttgcattattattcaactgatacttgatcagagcattgatctgttcctgagacatatttgtctcaacatctttgctgacctgttccataattgcatttgccttcaaaagcattgtaggcgacagacacttctttagcattgcagtaataaccgcctgctgattttttcctctctgattgtctccatcaggaagattgtgtctttccctgcaaaatgcaagagcttctttaccattaaaatgattatacccttcctgaacatccatagtatattctgaatctttacttgtcgtaaatgcaaattcagaatatacatcaattccgccaagcgtatcaacaatatcaattaatgaagtgaaatttaatctcgcataataattaatatctgtctcatataattcacccaaagttttcatagatgcatctataccatagattcccgcatgtgttaacttatctctctgtcctcctgaaactcccggaataggaacataataatcacgcggtgttgttacaagtaatatctgatgtgtttgtggatttacaactgcaataatattcacgtcacttcgacttgtttctgatacatcaccataaacatcaataccactgatataaactgtaaatggttcttttataatactgtcatctgttgctcctgttgaatttccgaaatccaactcaacacgtatattaaatgtatacaacactttcactttatcgctataaccatctactgcttcttccatcagacttgtatatgcactgttataaatgattgcatcacaatccccatcaatcaaagcctgtgcttgtgtctggacagaatcatactcttttacttcgatcgtatcaacgccaatctgcttttcaatatcggtcacagctgtctgtatattgccagcacctttctcaaactgtacaccatacgtatagtctgccgcatcttctattgtctctgccgaatcatctgctcgcactgcaacaaccatcttatctactttatagttgctgcctgtgatctttccaatcatattattagcctgagcgacataataacttcctgtaaacatcacaacagccataagtaaactgaacacttttcccaaagtcccccgttttctccttgccacctgtgaattcagtgtcacacaccataagaaaaacagtattgctgctgccagtatcagatacttatccggaatcattcctaacaaatacaataccgccattaaggctatactggcaatcgtctgaagaatgatacacaaagttcccagcttattacttcccgatctgcgggaatacttatttgtacttttctttctgcgtgcagaattgccagcagattcttttcgttttgccatcttacatcccttttctcaaattagaacaattttgacgggtaaactcctttttcaatcaatccacgaagtgctgctgttacagattctttatcttccttatatgtcaccccaaaccactggtcatgtgactgcagtacttttacttccagttttccatcacttaacagatctccaatcattgtcggaagcagatattctgcttttagatctgtactttctgttttctcaagaaactcatcaaatcctgtcttaagaatctcgaaaaattcaggtgtaattccccacatattcatagataccggtgaatcaacgtcaaggaatacatctccatcctctttgtggattacagcttttccgtcttctttttcgatgttatgtgtctcttcaatgtctgcaagcatgccatgtccgtctacttcgcacacacctctggtcacgcctccgttatcactcaatgtatttttcaatacaaagctgaccatacaaatctgcattatatcagcagatggaaggtttgtcaaataactgtatgcctctttaaatgcttcttttccataataatcatctgcattgattacaaggaatggagcatccaccacatctttacagcaaagaattgcctgacctgttccccaaggttttgttcttcctgtgaattttccgctgaatttttccggaatatcatcaagctcttgaaatgcatatgctacttctacttctttttcaatacggttgccaatgatctctttgaaatctttctcgagatctttgcggataacgaatacaactttgtcaaaccctgcttctaatgcatcatagatggagtagtccatgataatctctccatttggtccaatcggagccagctgcttgattccgcctccaaaacgacttccaatgcctgccgccatgattactaatgttgctttgctcatttctttttcctcctaatgtctcttcactgttacaatataccggtttataaacactacttattctcccaatccatctttcacaagttgaaccatgtctgaaagtgctgtttcttcgtcttctccttcacaaataattgtaatctcatctccgctttttatgcatgcacccagtacacttaatacacttttggcatttgcattcacttcttcatttttcattttcttgtacactgtgatcttgctcttgtactgcatcgcagttttacaaaacaatcctgccggtcttaaatgaagtcctgtcggatttttgatcactactttatcgcttaccatgttattctcctattctatctctctgatagtttgaagttttaacttcaacatcatataatatgcattaaaaactgtcaatgccagccttcttaattcttttttaatttaaacctactttttttaattaatatgaagtatcactaatttgtctcagcgtcattttccggttgttcatcctctgtagattctttttcagtcaatgtaagctgcactgtcactggttttgtcaatgtcactccatctggaagatctacttctaccggtatgtcataagtaccttccttcgtgtaattctgtaggtttaccgatactgcattactgatatccagactatccagcgtatctttctctccctgaaatacaagtgtcacctcagcatctggctcataacttacctgaagattttttgccagataattctgtttgatggatgcaaccataaactcaattgtacgatttcccaactgttcgatcattgcagttgcggtaacctttcccgaagcaccttcaataagttctacaccttccggcagataatctgtaatgtcgaatgctttctctatcttttctgttgccccatcaatagacaattcagatgctggaatattgatactttcaatctgggataaagcctcttcttttccgcagacctgcacgctcgctggttcgctcgaacaacccagatattcatatccatctgccggtgttccagatgcttcaaatttcaacggaaccgtcttgatcctcatcactgtcacatctacagtgattccatcttctccaagattattacttagctgtccctgattgatcacatttccagatgcatcatataaaacaagttctgctgtaagttcttcatctttcgaaattccatctacattaatcttcgctacagccttatcaattgattttactgtggattctgctcctgtaatcgttattttttccggattaactttcatctctccaatctgataaccgtcacgctgcgttccggttgtgctaacagtcaatgtaaatacattcttacctgtcggttctgtcttaatctgtatgtttctcggaacagactctgccgactgataagatccactatactttggaattgatactgaaattggtatcaaccctgtcttggaatccatttctttaatatccgcagtagccacaatatcatctgacttaatctgttgaatcactgaacgttttgcataaacaactacgtttacattctgatcatctaaaaccgtataaacttccccaccctgtgcaatcacatcatcgttcgctatcgtaactttgatgtttgtataggttgatttcgtaaccggattagcaacattcgcaacaatcagccaaagaaatgctgcaaaaacaaatgcaataatcttaagcggaagattcgttgtcaatttgtattttttcatgatctgtgccatcctttccgtatagaaaacttgttctttgtctctgtctttctatactgaatctggcttaactgactccgaagttcttctgcgttaatagctcgaagcaatcgtcctccggaagccacagaaacaagtcccgtttcttctgaaacaacaatcacaagggcatcacaaacctcgctcattcccaatgcagcacgatgccttgttcccagatctttactgattgtcatgttatccgaaagtggcagatagcatgttgctgatgtaattctgtcccctctgataataaccgcgccgtcatgaagtggtgtgttatgttcaaaaatattgatcagcacctgagaagacactttacaatcaagctctatacctgtcatttcatactctgttaactgaatcacctgttctactacgatcaatgctcctgtacatacacttcccatagcataacaagctcttacaatactatccagtgtttcatctgaaaacctttgattttctttatttttatcaaacggattaatgttactaaataaattcttctctcccagcttctccagtgcccgtctaagttcgggttgaaaaacaataattgctgctatcgctaatacattaattgactcttttgccagatacaggatcgtattcatttgaaaaagccatgccagaagaataaagcctcccaacatcagcattcctcgcagaagcatccaggcttttgtgttcttgatccagagcatgatttcatagacaataatcgtcacaatcagaatctctatgatatcttttatctgtatatgtggaaaatacattccatttgaataatttcttataaaattctgaatccactctatcatctcaagtctcaccaccttatgtaatcattcgttgtcatccacttttgagtcttttttctactgattactcgtttttctcattattctgatccaaacctaattccttactcagacttcttgttaaaagaatgtcttccgtcatctttgaatcattaaaaattgctgtctgtgtaaaatcaggctcctttttcaattgttctgctcggtttccgatctctttcttttcaatctttttcaaatcagatacctctgatgcagcaacattgctttctctctctgagatatccagcatctccgattcctgttcctgatgttctgtaatatgtttcacttgcttctcaggcatctgaactcctactttcggaactgcctttacataataatagtattcgtcatcttcaaactgaacattctctgttcttgaataatccacagagaaaaaaataacttcaaggaacaatcctattacaacaccaagaattccactgaaaatcatcatcgtataagacatatgaagtccaagagaaatatttcccgatgcacctacgatcacacaaactgctgctcctgttgctgatgcaatcttccaggaatgatcgactgcccgatttttaataccgttcactaccagtattccaatcactactgcaaacagcataacccacatctcttgatagcctacaaactgttttgtaaaattggttaaagtgctgatcattgttgttccatctgtacctttcaatgctgttgcagaagctttgatcaggtaaagtagataataaacaagaattccgcaggatgcagggacaatccatactgtagtacctaacagcccaaatataaccggaatcaccagtggtattttcatgccgaaagctactaccgtcagcagaatcagccagctcttctccggggtaaatcgaaagtagaaaatatacattaacaaaaacagtatcaccgtaactccggctattggcatagataatgtatataaatgagccactattaacacggttgctgctgccgtcataactgccagagggagaaatgtacagactactgctaagccaacagtacaaagaacagatgatgccatcttcataaatccaatattagaattgatcaggttaaacaccaaaagtgcaagcaaaaactgtgctccctttcgaaccaagagagagtgagaaacataaatctgcttaaatctttctctaagaaccagtaaattgttcattgttcattcttctcctttttacacatcttctctaaacgggacaaattacgataataacgttttacattctgtttggcaactgcatgttttctcttataaaaactatttgcgcaaaccccatatataactaaaagaactatatagcctgcaattgctgcaatcaagagaacgaatagtttgaaaattgtcagatcagcagataaactatcacttgaataaatgcagaaactaacgaacaaaattgcataacctattgttacccagatcaatgtaatccatgtcttaagacttgcataatcttttctgtaataatcggcaattttaaaatcatctttgtgatttttctcatatatcgacatttttgtcattaaacgaatcctgtctttatctaacatatccgacattcacctttccagatttctctcctaagtataccatatgttcagatgccttgtccaatgcttagagtcaaaaagtagacattttcaacacctgcttttttcaggattcctgcagcacgttctattgtacttccggttgtgtaaatatcatcaatcagaagaatgttctggcgtggattccacgattttgaaaccgcaaatgcccccttcagatttctatgtctctgctccccgttcatttcctttaaaggtcgggttttcttaatccgatataaaacatctttttccataggaattcccatgcattctgataactgctttgctaaaagttctgcctgattatatcctcgttttctcattttcgatctatgtaatggaattggaataattgcctggatcccccatcttcgaatctgaaattcaaactcatctgccagctctttcccaaagatttccgcataatatcgcttgttgtgatatttcaaccgatatactgaatttgaaaccggcggaatgtgaacccagaggctacgtccttgttcataattactttttcttctttcacaatccctgcaatactctttcgtttcatcctccaatggctttccacaatggatacattttatttttcccaccttaacaacctgttttctacagtcatcgcaaataccttttgagctgattccctgacaaaacgggcatctttttggatacattttttctaaaattccttgattcgctcgtctaagcttgtaaatcttccctgttcgcttttgttttcgatcatttcctgaaatgttagttcactccctactattgttaaacatttttttgcccgcgtcactgctgtataaagcagattcctgttatatagtaactttggtcctggaagaagtgggataatgaccgccggatactcgcttccctgagatttatgaaccgtaatcgcataggcaagttctaactcatctgtcatatcgtatccatattttacctttctcccctcatcatattccacgataacagtttctgtatattcattgatttcatcaataactcccatatcaccgttaaaaactccaatccctttgtcaactgttaatccaaatctggtagaaacttcccactctaattgataattatttttaatctgcattactttgtcaccttcacggaacaatctaccattaatttctttctccgttttttgagaatctgaaggattcagatattgctgtagaatcacattcaatcgttctacacccagcaatcccttacgtgttggtgtcattacctggatttcatttgggtcggcctgcacatatctgggtaatttcttctgtattaaagtaataacgacgctaatgatcgtattcgcatcctggcgttttaagaagaagaaatcccggcttttattatcaattgtaaccggttctcctgcattgatcttatgagcatttactacaatatcactctctcctgcctgacgaaaaatctttgtaagcgtcactacgtgaaatttttctgagcgtatgatatcttttaacacacttccaggtcccacagacggaagctgatccacatctcccacaagaataagtcttgttcccggaataactgctgataaaagcgcatgcatcagattcagatcaaccatggacatctcatctataatgataacatctgtctcaagtggattctctctgtttctcaaaaatccacctacactgttctcttcctcaggatttccacttacttcaagtagtctgtgaatcgtctgggcttcatatcctgtagcctctgtcattcgctttgccgcgcgtcctgttggcgctgcaagaaggatactcattccttcgctttcaaaaaattgaatcatcgtattgatcgttgtcgtcttacctgtacccggtcctcctgttaatatgagcaaaccatgtttaatagcttctataacagctctgtgctgcattggatccaattctatcttttctttctgttctactcttttcagacgtttctccatcatgtcttccggcatctgacagtcaatatcaagatcattaagcattttcgcagtattcaattccaagtaataataatgtgctggataaatgcgaatttcctcatccacttctttcataactgttttccgctctatacacagatccatgatgtacttctcaatatcttcaagatcaactcctaaaagtgcatttgcccttcgaagcaatatattctgtggtaaatacacatgcccctcacctactgcctgttgcaatgtataaaataaaccacttcgtatacgatagtctgaatctgtatgtatgccaatcttggatgcaatttcatccgcagtcttaaatccgattccttcaatattatctgcaagctgatacggattttcttctagcactttatacactttcattccgtaatactgataaatcttggctgccagctttgttgaaataccgtatttctgcagataaatcatggcttttcgcatatctttcttttcttcaagctgagatgcaatctcctgtgcctttctctcactgattcctttgatctccgcaagtctttccggctcttcttcaataatgcggaaagtatcctctttaaactttttcacgattcggccagccagtgccgcacccacacctttcactgctccggagccaagatatcgttcaatagaaacaatatcctccggctcttttactttataatgagaaatcttcaactgcttaccgtaaacattatgattcacatattctccttgaatttcaagaagttctccttcattaatatagttcagacttcccacgcatgtcacttcaccatcatcatgttcaatatggaatactgtatacccattatcagaatttctatatacaatatgactcacataccctgtaactgtttccacactttttcctctctcttcttgtatcttttcctatttatatgcagaaaaagggtgtgttcctattatacacaccccttgtaattgaatcttcttctctaagaacctgacacttcaaattctttttcagaattctttctcttaaaactcttttcttccactcataaattccacaaactgtccggtaccaattgcaacgactttcatcggatcctccgctgtcatcgtattaattcctgttctctcttcgatcaattcttccaatccgcgaagaagtgctcctcctccggtaagaacaattccacgatcaaggatatctgccgacaactctggcggagtctgctcaagtactccgattacagcttctacaatctgtcctgtagattctctcaaagcttcttctgtctcagatgaagtcaccgtaactgtcttcggaagccccgttaccagattacgccctctgacttccatcttctcttcttctacaagtggataagtcgttccaattttaatcttgatatcttctgccgttctttctccaatcagaagattgtgtttctttctcatatagcgtacgattgcttcatcgaaatcatcacccgctatcttaattgatgtattcacaactgttccacccaacgaaataactgcaatatctgctgtaccgccaccgatatcaacaatcatatttccacaaggctttgaaatatctatccctgctcctattgctgctgccacaggttcttcaatcagatgaacttctcttgctccggctgcaaatgtagcctcttccactgcttttttttctacttctgtaacaccacttggtacacagatactgattctcggcttcttaaatgtacgttttcccagagctttctgaacaaaatacttaatcatcttctccgtcacggtataatcagagattactccttgtctgagtggtcttaccgcaataatatttcccggtgttcttccaagcatcagacgcgcttcttcaccaattgccttgatcacattcgtatcacgatcaaatgcgacaactgatggttctttcagaacaaccccttttcctttcacatataccagtacactggctgtccccaaatctattccaagatctactgacatcataatttctatatctcccttctaaaacgctcttttactgttctcagcaatctactacaaataaacaactttgtctgttactgattccagcattctctttcctcaatcaagtgtcttttgtcccttgaaggggtttatcgttactgttttttactattactgttgtcaatattatgtagccaaaacagtaatgttttatcatccgcatactttagtataatagacttcgcttaaaatagaaaggcattttttgcatatattttacgacttttttcgactttttttcgtctttatttctccaatatagacgcaatatatttccctgtataagaatctggattctttgcgacctcttccggagtaccacttgccacaacagttcctccgcggtctcctccttctggtccaatgtcaataatatagtctgccgtcttaatcacatccagattatgttcgattacaattactgtatttccatccccggaaagtctgcggagtatctctgttaatttatgcacatctgcaaaatgaagtcctgtcgtaggttcatccagaatatataccgtttttccggtactgcgtttgctaagttctgtcgcaagtttaattctctgtgcctcgccacctgaaagctctgtagaaggctgtcccaaacgaatatacgacaatccgacatctctcaacgtctccatctttcttcgaatgcttggcacgttttcgaagaaatctaccgcttcttccactgtcatattcaatacatcataaatatttttccctttatagcgcacttccagcgtctcacgattgtaacgctttccaccacagacctcacatggaacataaacatctggaagaaaatgcatctcgattttcaggattccgtctcctgcacatgcttcgcaacgtccccctttaacattaaagctaaaccgtcctttcttgtatccacgtgcttttgcatccggcgttcctgcaaacaaatctcggatcaaatcaaacacgcctgtataagtggcaggatttgaccgtggcgtccttccgattggtgactggtcgatattaatcactttgtcaacctgctctagcccttctattctcttatgttttccagggattgttcttgcccggttcaagtctcttgcaagtcttttatataaaatctgattcacaagagaacttttccccgatccagacactcccgttacacaagtcataactcccaaagggaattttacatcaatgttcttgagattattctcttgtgcaccgactactttcagataacctgtcggcttctttctttctgtcggaaccggaatcctgatttttccactcaaatacgctcctgtgacagaatttggatttttcataatttcctgtgcatttcccacagcaacaacctgaccgccatgttctcctgcccccggaccgatatctactatataatccgctgccagcatcgtatcttcatcatgttctactacaatcaatgaatttccaagatcacgcaaatgtttcagcgtcgcaagaagtttatcattatctctttgatgaagtccgatactcggctcatccagaatatatgcaactccgaccagacctgatccaatctgtgttgcaagtcgaatcctctgtgcttctccaccggaaagtgttcctgtcgcacgcgcaagcgtcagataatccagaccgacatccatcaaaaacctgattcttgctttgatctctttcagaatctgattaccaatcaactgctgtgtctctgtcaattgaagttcatctaaaaatttctgaagacgttctatagaaagtgttgtcacttctgaaatattcttatctccaactgttacagctaaagcccccggcttcaagcgctgtcctttacaggctgaacatggtgtaatattcataaatgtctcatattctgctttcatcgtctgagaacctgtctcacggtaacgacgttccacattcttgatcaatccttcaaatgcaaccggataaatcccttcgcctctctgacctttataataaaccttcacttcttttccatctgttccataaatcaaaatatcatggatttttttcggatagtcctcaaaaggggtgtccagatcaaaatgatattctttacaaagtgcatccagaattgcacgtgtgaagctgctcttgtctgtacaggactgccatcctaaaactgcaatcgcaccttgattaatagacaacgacggatccggaatcatcagttcttctgaaaattccattttgtatccaagtccaaaacattccgggcaagcaccaaatggattgttaaaagaaaaactgcgtggttcaatctcatcaatactgatttcgcagacaggacatgaaaagctctggctgaaattcagagattctccatcgatcacgtcaacaacaagcagaccttctgcgagctcaagtacattttcgacagaatctgtcagtcgtttttcaattccaggttttatcacaagacgatccacaataatttcaatattatgcttgatattcttatctaatgtaatttcttctgaaagctcatacatattgccatccacacgaacacgaacatatccactcttttttgcacgttcgaaaagctttgcatgtgttccttttcttccacgtacaacaggtgccaaaagctgtatcttcgttctctccggaagcgccataatctgatccaccatctgatctaccgactgttttgcaatctcacgaccacatttcgggcaatgcggaattccaactctcgcatataataatcgaaaataatcataaatctccgtaacagttccaactgtggaacgtggattgtggttcgttgatttctgatcgatagaaattgcaggtgaaagcccttcgatactttctacatccggtttctccatctgaccaagaaactgtcttgcataggaagacagtgattccatataacgtctctgtccttctgcataaattgtatcaaatgcaagggaagattttccagaaccgctaagtcccgtcaaaacaaccagttcatttcttgggatatctacatctatattcttcaggttattctcattcgcgcctcgtatcttaatgtactgtctggcgtccattttcttacccattttgtaatctcctattccatatcattgagcatcttttttaattcaacaagcttatcacgaagctctgccgctgcctcaaagttcaattccgctgctgccttcttcatctgtttcgtcagatccgcgatcagtttctccagttctttctggctcatggactccggatctttttcaagccgcatctcttctgtcgcaacctttttagagatactgatcagatcacgcactgacttctgaatcgtcttcggcgtgattccatgctcttcattgtatctcatctgaatctcacgacgacgctgtgtctcatcgatcgccagctgcattgattctgtaatcttatctgcatacatgattacatgtccttctgcattacgcgctgcacgaccgattgtctgaatcagcgaagtctctgaacgaaggaatccttctttatctgcatcaaggattgcaacaagagtgatttccggaatatcaagtccttctctcaagaggttgatcccaaccaacacatcaaacacatccagacgcatatctcggatgatctccgtacgttcaagcgtatcaatatccgaatgaagatattttacacggattcctacttcacgcatataatctgtcaaatcttctgccatgcgctttgtcagcgttgtgacaaggactttattcttcttactgatctctttgttcacttcaccgatcagatcatcaatctgtccttctaccggtcgcacttcaacttccggatccagaagtcctgtcggacggattacctgttctgctcgaagaagttcatgatccttctcatattctcctggtgttgcagatacaaacatcacctgattgatcttactttcaaactcatcaaagttaagtggacggttatccttcgcagatggcaggcggaatccataatctaccaatgtctgctttctcgactggtctccgtgatacattccaccaatctgcgggattgtcttatgtgactcatcaatcatcataataaaatcatccgggaaataatcgatcaatgtatacggagcctgtcctggtcgaagccctgccaaatgtctggaataattctcaattccggaacaaaatccagtctccttaagcatctcaatatcaaaattcgttcgctccgcaatacgctgtgcttctagaagtttgtcatttctcttaaactctttgacacgttcttccagttcttcctcgatatctgccactgcacgcttgatattctcacggtcaaccacataatgagatgccggaaagattgctacatgcttcagttcgtccttcacttctcctgtcaaaatatcaatctctgagatcctgtctatctcgtctccaaagaattccacacgaatcgctgtgtcactctcatatgccggaatgatttccaaaacatctccacgcacacgaaatgtaccacggtggaaatccatatcattacgatcatactggatctcaatcagctttgccattacttcatcacgatctttgatcataccaggacgcaaagaaactaccatgttctggtaatctaccgggttacccagtccataaatacaagacacactggcaacaatgatcacatctcgcctctccatcagtgacatagttgcggaaagtcgaagcttatcgatctcatcattgatggatgaatccttggcaatgtatgtgtccgaagatggaacatatgcttccggctgataatagtcgtagtaggagacaaaatattccactgcgttatttggaaagaactctttgaattccccatacagctgcgcagccagcgtcttattatgtgcaataatcaatgtcggcttgttcatctgttgaatgacattcgccatggtaaatgtcttaccagatccagtaacgccaagcaacgtctgacactggtttccttctttgaagccttcgaccagctctttaattgcctgcggctggtcgccagttgggttgtattgtgatactaattcaaaatgatccatgtaatttctcctgagcgctctaatttagcggtgatattttagaaatagtagttgttttcttagtattgttacttgtatagtatatcattcaggagaaaaaaagtacagaactaaatcgaatgtttgttctgtacttttacatcttagctcgattccacatacctttaaaatgtatctggatttaaagtcaaattttttatttcgttgacagaataaacttttaagatatataatatttttattacatttgtaagacttggaggaatatcacatgagcaatctgcctcaaatttcagaagctgaatttgaagttatgaaaatcgtttggaaatacgcaccaatcagcaccaatgaaattactgaaaaattaacacaaatttccagttggagtcctaaaacaattcagacattgattaaacgtctcgtttctaaaaaagcactaacctatgaaaaacaaagccgggtttttgtctatactccattggtcaaggaagacgaatatattcggcaggaaagtaattcttttttaaagcgatattataatggtaatatcacttctatgcttgcctcttacattgaggatgataaattgtctgaagaagacattgccagcttacggaatcttctttccaatcattaaccatgggggagcatattttgatatattttagttttcgatttttactctgtaatgccatcatttgtatttttttaggtagtttactgggattaaaaaatttattgcaaaggcaattatccgcacgtatgcaatataatctttcgattatatttcttgccgttctaattgttccctttttacctataaactctgtcccatcttctatatcgtggagacatttgctgacagccagttcaagtaccaatggtgacattcaaaccacttttctttctggtaatggttataatttggataaaataaatgattttgctgtctctgtcagcacccaaataccaacttttattcacacattacttgtctttttctggagtatcggtatattcataatgttttttcttctctaccgctcagtaaaacaagtaaaagccttacatagttctgctttacctcttcaaaatgaagaactaaacgctctttatatagaatgtttaaacgaagtgaacagcaagcatacccttccgatttatagtacagcatttttgaaatctcctgttttggctggtttcctgcatcctcgcatttatcttccaattcacttgatttcagattttaacgctggaactataagctcaactgatattcgatatatgcttcttcatgaactgcagcactacaagcataaagatattctaattggatatttgataaatacagtaaatgttttctactggttcaatcccctaatctggtattttctaaaaaaaatacgtcaggaacgggaacttgcctgcgacagtgctgtattacaattattgaaagaaacagaatacaagtcatatggaaatacactgattaactttgccgaaacaatagctctgtctccattcccttttactatgggaatcagtggaaatataaaacagttaaaaggacgcattttaaatattgcatcattccaccaacctacttttaaacaaaaaattcgtggatatcttatatgcatattcgtctctactatcatcattggatgcattcccatactttctgtttatgcttctgatcagactggctatcattttgacacaaccgaaaagaatattactcagctaaatctttcttccaattttggggactacaccggaagttttgttttatatgatcagtctgctgataaatggaatatttataatatggatcatgcttccacacgtgtatcaccgaattcgacttataaaatatatgatgcattacttggcttggaatctggaattattacaccagaacattccactttcacatggaatggagaaccatatccttttaattcatgggaagccgatcaagatttaacctcggctatacataattccgtaaactggtattttcaggcaattgattcacaggcaggttttgaagccgtaagaacatttttacagacaataaactatgggaatcagaatactggaacaaatctaaatctctattggacagatttctctctgaagatatcacccatagaacaggtggaattgttacaggatttctatcaaaataattttcattttgacagtaaaaatatccaggcagtagaaaaagccctgctgctttccactacttcttccggttctctttacgggaaaacaggaaccgggcgtgtcaatggtaaagatgtcaatggctggtttatcggatacattgaaacatcgaataatacttactacttcgcaacaaatattcaatcctcttctggtgcaactggaagtcaggctaccgaaataacagaatctgtactttctaatcttggtatttggaaataaataaagagaactgatagcataatttcccgttatcagttctctttatttatttcttctctactgatcaattctgcaaattacctaaccggtactgatacctcggtatattatcaataccattatctaaaatcctgtttccaacatactgaatcgttccatcatcctgaattttcatcgtaagttcgtgtgtaataacagcatcattacatacaacagaatcacatactgcatgaattgtcaaaacaatggttccatcttcattgttcctgacttctgttacttccggtaaagacaagccaaaatgtgttggtgaataattaccacatcccaatcgttcccagataaacatattactttgttcatcgtagaccgcccattctctcaattcttcttttgtaacaggaagatatgtcataattacattttcgaactcttctgctggaattcccacaacctctttttctgcagtaaatttttctccatatttcatttgataaaaatattcataaagtccattataatccaacccctgcatatcctccgcattccagtttgaacataacagattgtttccctgatagccgaacgtactcacatatttttttgaatattcccgacactcctcactcaaaggctttacccggataatacaacttccatctacaatctctgtcacttccggtggttcaggtacgcataattcataacagaaattcccattttcagtatatgcccattcttttatttttgatagcgatatgtatgtaagtacaggctctgtatcctcactccagatcatttttgcggacatcacactcatttcttttccatcataactatattcttttctggtaattccaccatctgtatctgcttcatataaaattacacttcctttttcttcttgttctgcagattttaaaaattgttccatcttctggtagttatccataacagaataatgatcggaaccaatgaccggattcccattttgtttgataatttctttcatccgattcatcatttgctcagcagtgttctgatctgcttcttgtattccattatattcagaataaatatctcggataatgcccataatttcttcacaatcgttcacagcttcctttttcttgtcttcatcgattggtagattatatcccttatccggattttccatggtagtgtttttctgattcttctcgttttttacatctgtgctgtttaacgatatcttactttcacaggaagtcagaatcagtcctatacaaagtactaacaaaataccttttcttttcatattcccccctaattattactgtaattcgcttcccactcttcttctgttaaccttggcatataccaccctgcatttgcattttgatctgacttgattaccttatttgataaatactggaaacttccgtcttccataggttttatcatcaattcactggtgattgcctgatctaacattctgatttcccatactgcttctatcgtaagttttaatgttccatcttgtaatttttcatatgagacaacttccggatatggctcatatgggaattcacaatcatataaccctcgcggtctgtatctaaaagttctattatcagagttataaaaagttcctttttcaatctcggtattactaaatggtaaataggtctttataacctcttcaaactcatcttctggaacttcatattctgctccaccataatttgcttcatatggaacttgctttccatatttcatataatacattttttcataaagatcataaaaatcaagttccgtataattctggttatcccaatttgtaatcaacagattattaagtgcataccccaacggcataacatattttcgattcaattcccggcatgttttatctaatggccgcactctgaatccaatttcacccggtgctccatcaaatcccggtgggtgatattcctccagaaacaagtatcctttttctgtatatttccactcatatgcttcatattcatcataataattagcctgtgggctattatccttccatttaacctgacataatcgaacatttatctttccattcattgactctaaatgatattgtataatttccccttcatcaaatacaacaacaatatctactgctgcctgttctgctttctccgctgctttgcaaaattcttctactttttcacgattgaccatatcaatctgattatcacaatctactgccgcatatccttttttttccagacaattgataatttttcttttcacctttaatgtatttaactccgacttctccttcatataaacagaccgaaaagtttgcgctgttttttttacttctgcattcatttcagattctacggtttctttcttttcttctttttccgtaattcgattttgtccgcaccctgtaaaaacaataagaactatcaatatcatcgcaaatatcttacatatgtaataattccacataaaaatttttttattcttcaaaatactcatccaatattgttgcatcttttttaacaacataaccacttccaccgattcctttcttctaatttttttgttccttaaatcttacgcttgtaatatttaaaaatcaagtctattttcaggaattgtatactccagattcaccatctttatgtgcgatatatcctattttattaccatcctctatatcttctccatttttgttaccctgtcattttaaagaacatccttacttacactgttacatatttttccgcttcttctttgcacttcaacgtatttccatgcccaattacatattccatacattcttttccctgctcttcttttccgattcggtagtaacatactcccagcaggaatctgcgtgtaacctcataataaggcaacttttccgtatcattttccagtaatcttactgctgcctcatcttcacctttcagcatcaaattttttgccataaacagtggattcttttgaaatactttccctgctttttctaatgtagccgaataacctgccgcatctttctcctgatatttcttcgacagttcgagattcgtcatgacctgctgccaggaacgtccctctctttttccttcccattcattctttatatactcttctgccttctgcaactgcccatttatgatcagtgcaactacatatttagactcagctatcagcatgacacttttttgaaatccatgataatccaagctctttccgtactttatcaactcttccagcatttctgaatatttttctgcatcacattgctgtgacagaatccggtcaatttttgaaaaatctctgagaatgtccctgattaaaatgaatatacctgcaatcagatcaaccaccacgcaaatccacagaagccagggatctgtcgtgacccagcccggctgcttcacatcgaaaaagagtactgtctcctgatgcgggaacggatttcctttgaaaatactcaccacacagatcaatgctgcataaatcaacagcacattccgtatcatcctgatgcgtccatttttctgcttttcataaatcttttttatctgctcttccattttctctacctcgctgtcacactatttttgtacctacaacataattatacataatttctgctgttattgaaatcttctcttgctgtctcctgctttccgggagtataagctgccagcagagttttatggcactcggacaggcaaagatcagtctgcttcttgcatgcctgcgaaaactgatcctgctgatccctctgatctttatcctgccgctctttttatctgataaggtatttgcagttttccttgcagaaccagtcagtgatatcctggcggctgccattacaaccataaccttcttaagccgctttaatggaatattgaaccagaaagacctcgcctgctgcaaaattttcaccaatacagactgatgcaattaatgccagtgataccagtacatctgattgcctgaacctgtccgattattttcttcagtcttcggtgcagattatctgcatccatacattgtctcatcttcccatctccttatcaccagaaatattaatattgtagcgaatctctgttcggttgtacaatatctactgttgcctgttcttctttctccgctgatttgcaaaattcttctactttttcacgattgaccatatcgatctgattatcacaatctaccgccgcatatcctttttcttccagacaattgataatttttcttttcacctttaatgtatttaactccgacttctccttcatataaacagaccgaaaagtttgcgctgttttttttacttctgcattcatttcagattctacggtttctttcttttcttctttttccgtaattcgattttggccgcaccctgtaaaaacaataagaactatcaatatcatcgcaattttcttacatatgtaataattccccgtaaaaatttttttatttttcaaaatattcctccaatacggttgcatcctttttaacaacataaccacttccaccgattcctttcacattctcaaccatactgataagaagaattggtttgtccacgcttttatctgccgtaaacgccgaaaaccacccgatttctttgccagaagtatcttctttcgttgccttcaactcggctgtccctgtttttccagccagcaaaatatcgtcacgatgtgcagcatatccggttccttccggatcatttacaacaccttccaccccttgcataatttcttctacattttctttgctaaacgcattttctatccatgtttcaccagatgcttcttctttgtatttcaaatacggttttatcatattcccttcatttaaaaatgaagtataaatacttgccagatgtaatggatttacaagaatctgcccttgcccataaccactatctgccaattgtatttctgtttctattttatctgtattggaatatgttgattcctgcatcgcaatctcaaacggcatattctgattaaatcctatttcatttaaagtattcataaaattctcactaccaattttaagagctgcctttgcaaaataaatattatcagaatagataattgcatttttcataataaccggttcatattcatgaagtgttgtcacttgataagatccccaagacgaatctttctgccatgccaaaccttcatttccaaaatcttcttttggatctatgcttcccgttttcaacccaattcctgccacaactggtttaaatgttgagccaggacaccatacttgacggaaacgattatataatggtttcttttcatcttcgtttaatgatgtccatttctctgatgataagccccgtataaattcattattatcataagatggggtacttaccaaagccaatacttctcccgtataaggattcattgcgacagaacaccccggatcttctttaaactgctcgtataatgatttttgcaaatcggaatctatcgttaattttatatccataccatcttctttaaaaatacttgcaagaacctcttttacttccccatcactatccaaaatctttatatcacaaccatcttttccttttaattgcttttcgtataacttttccaccccagatcttccgatcacactttcaactgaatatccttcccctggatgattttccaaatcttctgctgttatagactgtacataaccaattaaatgagctgctgcttcccctaactcataggttctaacttccacatctgatagcataacccctggaatttccaaaagtttattctgacaatcctgctcctcaagtgtcttttcttctggctgtattttcattaaatctatttcttctactttcggaatagtttcaattggtacaaaagaatcttcttttacccactttgctgtgagtttgttatttattgtttctacatctatctctaataactccgctattttttcaatagatacattcctgtcttccagctttcccggtataatgccaactgatgttgctactccttttcctgcaagcattttaccatctcggtctaatatttctcctctctccgcttttgatgtagtaacacttattttatcatcactctctaaatctggaaaaatcaggctatcctgccatactaatttatatccctgtttcgtcttcttcagttccgccatattgtcaaattgtattgttccggcaattgtattacatgatgtttcatacgaaagcgtaactgtatctgcttttttctctttcacagctatatgactggttttaatgtcactgacctctattccttcgtatatcttagaatttcgttgtatgtattcttcttttgtcagataaactttttcatctgaatctatcatagtatacattacttcatattcctttttttcaatatggttcatatattccataagtgtgtcttctggtgattctgttatcgtcctttttaataaaacacctcctgaaacagcaattactgttatagctactatcaacccaaaaatcttacaaatgtgagatttttggatattttgcttttttcgtcttcttttcatagatacccctttcttctaattattttatttttcaaaatcttacacctgtaatatttaaaagtcaagtaaaatattatgttttcttttaaaattttgtttaatacattcatccaaaagactctccaataaaaaactgacgaaatttctttagggcaataataattagcttttgttcttccgttacctatccattttgaaatttgttttcccaccaattctaatgctaagataacaaatcaatgactgactcaaacagatgcaccgtatcattggatttctctgtgaaaatggaaaaagaatagttcttatcacttccatttgcttctccgataaaactggttccgattcccctaatagctgcatatttcggatttcctttctcatccatccctacaaacaccgtattgtgatgaaattcactttcataaactcttccagactctaagcaaaactgaatgatttctttatcaatcccacgtcctgaaagatacgcaatcactttttgattatcttgatttttctttggcaacagtagctgtttctccatcagaacactcttagatacagaaagaggcggttgaatatttgcccgttctgcaagcaattcaaccgcctctaaaaaactgtatccttttactttaaccagataatccagtgctgatctgccaccggttctctgactccaccacatccatttcccatttgatattttcaaaccatcgtgtgttctggtagtgtaggtattaccagaaaagtgaaccaattcgtatggttcataatttttcaagtatgtgaataagtccatccgcttgacctcctgcacgactgatggtggtatatatggcataattttcatctcctttcctaccttggattgatattattcgggataatcccgggcatgaaaatagccaggtgattccttgggggtagaaccaactggctatgtattcatagattatttatcctctttcccaccatctcttttcttttttcaccttatacttttctccatatttttcataatacattcttcgcaattgcttgtctttcataacatcttttgctaatttccatgtcaacatagattgtattcctttattatttttatctatttctggaaaacacttcttgattgtctcgacatcgcaactccaaatcgctgtattaatttttttgtacagctgatcctcttccccatcttcttcatatacatcaatcaattctggatgttcatcataatattgcgctctactttccatttccttcatacaacgttctacatactcttcagaatttacatatacttcatgataccagatgtcatctaaataattctttatcctttcattatctatttttgcgcttttaacaatctgatcaaatatcctcatcattcgatttataaatatcgtcattccatgcattagttgaatttttgtgcgatattcatcttgtctttccatttgtcctctactaaccaactcaaaaagtctggcgcattcatttactatatcaaaatgtttcattgcctcatattcttcttgcgatataatattatccaaaaccaaactttcaaatggaatacctttatattggcttagtatttcattataataaatcatcggaatatccatcaaattcttgaaattgttatccttcttctcatcttctattttctcaaaatcaatatttcgtaacgaatcaaaaaattcagatatttcttttgtttccttaatcggcaaaaaataatatcccacatattcttctctaactcgatattcattaatattcaatattaaacgcttatataatctgtctatagacatatacaatggatttaataacatttgtttatatcgtacttttcgcttcttatccattcttgcatttatattttctatatatactgtaactaatgccgaagtaataattcctgtagacaaccctacaactattttttttacatcattgtaactttcgggcatccaacaagatccaattaatgctcctatagctactactacaagaatgcttattgcaacatacaacatattaactttttcctgaagtatattcagttttttactcaaaaattttattacctttcttatttttttcatatgtctattttccatcatctttccgaatttcatcaattatccgacctatattacaagtaatctgtcctttacactgatgaatatcttcattgattttcttttcctgctcaatagcaatctctactttctctgccaactctccaattgcagaattcttcttcggattgattcctgttctggcaagtaacaacttatagataaatgtctgatgtccatctttttcattctggataatctgttcagcattcggctcaatatcatcttcatatgaattttcataatgtaacagcaagaacaattcaaatgccggattgctaaccgctaatatattgttcttttcaccttctgctactaattcatcataatcaagcaccttctcttcaaaaatatctccatcaaaaacaatgatcatcttatctcgttctttatcaaatgatatttccggattttctttctggtcttccgcaaattcaatcaaacgtcttggaaatgaaatatctctgtctccctctgttttttcaagcaaacggatatcaatcaacggatgaatatttaattcttttcgtatatcaattaactttttgaaataccatgtttctgtattagcaccttcacatatgaaaaagtacttacgataaggctcaatctgttcttcttcatctgtagttctgctattccaattcgtataacttcttactggagccaaggctactcctcctctctcggtgcagaaatactttctgcactgtcacagcagtcgtcaggtgtctgtgcaagcacatccttctgactcgttgctcgcgcaaaatcgaatgttgaaaataccggtatcgcaccatatcttccttccagatatgccttgctcaaaactttatcgtatctctccttgaaacgatctaaggaataaatagagcttgcattttctgcgttacgttctataaaccagatttcatcccttctaaaaatagcctgatccataatggatgattcatgtgtagtgaacaatagttgcatacgctgctcatcatgtagctgcataaacaattgcaaaaatcgttctgtcagcttcggatgtaagcttctctccaattcatccacaacataaagaacatcttctcgtttattcaacagcatatccatcaaatcgaataatcttcttgttccatcagactcttcatcaaaaccgaactcataaaatgacttattatgatgtaaccggattgttgtgaccttcggttcagaatgtccttcaacttcgatattaaagaaagtttccttcgacctcatcgtcattctgaatgatggttcttcctgctcttccattctattttttacatgctgcatcatcttatcaaatactgatttcggcaatgcatttgataactcatccaatgtaatttcttcaattttcacctggctgatacccgtatcaaatgttttgatcaatttgttaatcagcttcagcgaattatcatcataataatattccaaatcaatcaatggtgtatccggtgtgatgatcgaaatatgattctgaatccaatcatatacatcccggaaaaacaataatttagatcgtgtgctatatttttttccacgattcatttctgtcaggaacaaagatgtttcatttccttcaaaatcatctgcataggtttcaaatttatttttttctgtgtttgtcagcgtaataccatcatttaacaccggacgtttacttccttctcgttcaaagagacattttgctgaaccattctgatataattcatataaccattctccggttacttttcgtctgcttaaaactgcggaaaaaccataggcataaaatttgtcacctacagtaatctgaatttcaaaactactttctcgttccttattctcctgccgattcttacaaaacatctgtgtagcttctatcggaataccattgcagacactgtctttaaaaaatttaaagaacaatgccagattggtctttccagatgcatttgctccataaactactgcatattttaataactgggtactttttatctttaacctgtgatttgcatttgttcgtattttatttgaggaaatcattgtcagctctgctgctttatcaaaagatttaaaattttcaacacttacttttactaacattcttatacacctccacttttattatatgttttactcttctctcagtcaatgtaaattttcttatttagagattttttcgttatatattgtttctttttctatttttaacaattttattttgagttatgcatataatatcaatgtataagtcagttttttgtagcgacactattttactaatgccgctacatgaaatattacaataaataaaaacttctaattcttttttcttctatctctcccaatccatccttcctgtcacattcaacatcttttcttctcggaagctgagcatctttccattagttccaccgacaatgatatgatccaacaattctatccccagtagctgtccgcacttctgcagctttctcgtaacaatcatatccttttttgacggtttcacattgccactgggatgattatgaagtccaatgattgcagaagcatttgccagaatactgctcttaaaaacttctctgggaattaccaaagatgcattgattgttccaacactgaccagattcatattgattatctatccattatttttcatattcaggatacaatcaatcaggatataatcataatcctttttcaaatctgccagatacagctttaaagtctgctctctactcatggcatttaccagtgagatttccatgcccgataattcaatgttagttggaataatgtctactccttctttgtgatataaaattccctcattatacacaaatggttcgtcttgtaatactttcttcatctgtgtatccaacgtaataggaagattatctgcatcagtccaccctaatgcgattgttaagtctccctgtggatcagcatcaaccaataatactttccgcccctgatgtgcaagaccaattccaagatttaatgtcgttgtggtcttagcggttcctcccttctgatttgcaagagcgataactttacacttggtcatattgttacctccttcctcgaaaaatttaatagccaatccgttttacgagactggctatgtataaaaataagcatgaaaaaaccgattggctcttggtgaaccaatcggctatgtactattagcagacaattttttgatttttaggaataacggcctctgataatgttgcactattatttttaacatctgttacagcctcatctgcagattcatgagtttctaaccatagtttttcctctaattttaaatgttccatcaaaaagtcatgtcgcttagaataatcatcaaaaatttcgctccatttcagtacatatattttagtcaaaccgtcatcctgacaatgaactaaatgttgctctcctaaatgcttatgactttctaattctcccaaaatataatgacttttatcaaattcatttccaaccaaataaaacatccatttaacattacctgcattaaatcttggagtgtcttttattactcgcatatatttttttacttgtgataattctttttctcctaattttattttaggtctttttaattcaacaacaacattttctgttactttaccctgacgatcttgacgtaacatatatatatccatttctttatttttatcaggatgctctatatgtatctcttcttccattccagtttccgcttttatcattccctttaatgctaattcaaaatcaggttcagctgatgtaattaaattgtattgttctccaaaaatccaataatgattttctactaattcttgtacatgtgttacttcatatgaattaaactctttattaaacacaatttcttttaatgcctgaataactttctgcctatcacataataattttattgtttttgttatattacttaatgaactgtattcaagtatactagataattccttccgttcctcttcatccagttcaattacaccttgtaatattttaaacaactctggtttgtttccattatccataataagccttaataattgtaatgtgatttttttattatcattacttaagcctgtgaaaattttaggctgtgcagcatataaagcacctacaagactatctagttctttcttttgatacgcctgtataaaattcgtcgtatcaaattccggatacaatttatcatctatcagttttgaaatataagcatctgaagcttctttcaaatacctacttctatatttaataagaaatgtattaattccatttattaaaattttgtattcatcatcacacttattaggaaataagtccccttgaccttctatctcctcatttgtaaaatgaaaatcatcaaaataactactttttatatacacgctatgaaaaaaatggtctgcccttttgttcaattttgtagtttctttatatctttctttattatctgaaccaagataatatattcgcgaatattcattccccaatttttgcttccattgaacaaaacgaacgtcatacgtctccttacacccatatttagaaacatccatattttcagtatgctcaacaaaatctgaataatttatgcattctttatcaacgataattttatagtcattttctttattcaattccaaaaaccaaaaaaattcttctttgattttattgataatatcttctttttccatggattctaattgtgtaaaacttacctttgttcccgtcaatttttctactttacacggaagtttttcaccattatcatcatattgatttagagaatctttattcatagagatgtaatactcatatgtatccccatcttttcgatatacagtatcccaccttgccgtctgagaaaatgcaaaaaatgtcagacgaccaatcccttttctcccatgaggtaacgtatgatttgttttctgagacgcatttgcttttttagaatcattaaatggttgaaatttatatttcaattcatcataattaattccacatccattatcacgtattgtaatcatattgatgagtcccattttatttcgatttaactcaacttctacttgtgttgcaaatgcatcaaatccattccaaatatattcacaaatagcatctaacggctttatatttttcaaatttttttgtatgccttctggtgtaataagaacacttttcatcttttcactcttttctattgtaatttataaaactatataatacttttcaatatctataaatagaatgtactacctttggatttttcaatcatacattaactcctttttctctcacataatcggtaatatcttctaccaaatattcttttccctgtgtatgaagaacatcgtaacatttaataatatagttatccaaaattccggttgaatttaatattttatacactttagctggagacatcttccacttatccgcaaggctatacagcatgaatattgaaaaactcaattcctttttctcacacataatcactaccaacctttctgtcgtatttatatttagattataacaagtattttatgttcatacactatatttttcaattattatcaaaaagcaggcaatgaaaatcacaccccctcttcatccaactgattttttcatatactatccgcttcgcttcatctcgctatacgtacgtcgcacgatgcatataaaaagaaatcctcgatcacaagtaaacttgtgtcgaggatttctttttatatacgccgtgcttgtgctagacgcttacattccagcctgagctgcaacttctgctgcgaagtcgtcaactttcttttcgattccttcgccagtctcgaaacgaacgaattttgtaactttaacgtttgcaccgttctcttttgctaccttatcaacgtattttcctactgtaaggtcgctgtcctgaacgtatacctgatcaagcagacagatctctttgagctctttgttcagacgtccgatgatcatcttctcgatgatgttttccggtttctccgggttctctttcttagcctgagcaagaaggatttctttctcgtgatcaaggtaatcctgagatacttcctcacgggatacatacttcggagacatagctgctacctgcatagctacgttcttcagtgctactttgatctcgtcgttaacaacatctgtatcagcaacaacaagaacaccgatacgtccgccaccgtggatgtaaggaacaaccacaccgttgtctgctgcaactttctcgaatcttctgatgttcaggttctctccgataactgcgatcttctctacgagagcatcttttacagtctttgttgtatcagcttcccaagcctctgccataaatgcatcaagatcagctgcttctgaatctactacctggttagcaactgcttctacgaatccctggaactcgtcgttctttgcaacgaagtctgtctcagagtttacttctacgattgcagcaactttgtcatctttaacaactgtcttaacgataccttctgcagcgattcttccagcttttttctcagctttagcctgtccgttctttctaaggaactctacagctgcgtccatatctccgtttgtctcagaaagcgcttttttacagtccatcattccagcgcctgtcatttctcttaactcttttaccattcctgctgtgattgccatgataattttcctccattattcataatgtgtatgtcactgtaagcagtaacatatgcttttctctatagaactatttctataaagtaaaatgcttcaacctgataatcaggctgaagcattttctttcatatcaagaactgatattactcttctacagcctcttcagcttcagctgcttctgcagcctcctcgtaatactcatcctcagctgcaccctggtttgcttcgataacagcgtctgccatcttagaaacgatcagttttacagctctgattgcatcatcattacctgggattacgtaatccagctcttctggatcacagtttgtatcacagataccgatcagcggaattccgagtgtgtgtgcttcctgtacacagattctttctttcttaggatctacgatgaagatagcgtctggcagtttcttcatatctttgattccgccaaggttcttctcaagctttgtccactcttttttgatttcgataacttctttcttcggaagtacttcgaatgttccatcttctgccattctctcgatgtctttcagacgtttgatacggctctggattgtcttgaagtttgtaagcattcctccaagccatctctcgtttacataatacattccgcaacgctcagcctcagctttgattgcatcctgtgcctgtttctttgttcctacgaaaagaactgtaccgccttctgcagcgatgtcagaaacagccttatatgcatcgtcaaccattcctacagatttctgcaggtcgatgatgtagataccatttctctctgtgtagatgtatggagccatcttagggttccatcttcttgtctgatgtccaaaatgaacacctgcttccaataactgcttcattgaaataacgctcatgttattctcctccatttggtttttttcttccgtatgttttactctccttcgcaaccggacgaaactcctgtctcgacttaggcaccttggaaggaatccacatacgtgttttttagcaacgttcatagtatagcataaaacaagggacgttgcaagaactttttcccacaacacccccatttttcaacattttttgttattgttcgtactatgtacgaccaacagccatttttatccccctacacaacaaaatgtgaatttcctattcctataccagctgaaacgctttcagcacatacagccatcctgtcaacgtgaatgcactgaacaatgttgtcagcatcactacacttgatgataaaactccttcatgtcccatattctttgccataacaaaactgcttactgttgttgcagatccaagcattacaaggattgcaatcagttcttcctgacggaattccagtttcacagcaatcggaagaaaaattgccacaaatacgatcaacttcataattgttgctgtcacagccggtttgatctttccaagtgctttcctaaaatcaaaggtagctcccattgccatcagccccattggtgtggacattcctccaatacttgtcaccgttttgttgagaattgccggcatcgggatcttgcaggctgaccaaatcagaccagccacgattccaatgataattggattggttacgattccctttaacgttttcatccatacagctttatcaattgcttttcgttccggatggaaaaaggataacacgataactgccatcacattataaagtggtacacttccaatgatcataagtggcgccatccctgcatttccataaatattctggataaatgcaattccaagaagtgctgcgctgctccggtaagaagcctgtataaattccccttggattgaacggtctttccagatgcaagataccagtgcagcaattgtaatacagataaatgttactacaaagcagaaaatcacaaatttgatattccacacttctttaaaatcaacctttgccaggtcaccaaacaacaataccggcaatggaatcagaaagacaaatttattcatctttgctgcaaactcttcatccatccaaccaagctttctgaacagcattccaagtaccatcatcaaaaagatcggtacggttgcattcagactaaaaactaaattttccattcttctcaccagtcccctactctgtacgaagcgctgtcacaggatcactctttgctgctttctttgatgggatcagtccaccaagtaatgtaaggacaacacttaataaaatcagtatgattgccggaacaatcggcagaactgcatttaccttcgcattatccgccacactgtgaatgatcgcatttcccggaatcagaagtaacaaagtcagtccgattccgatcagtcctgcacaaagtccgataataaatgtctctgcattaaatacctgtgatacatttcgctttgacgcaccgattgctcttaatattccaatttccttcttccgctcaagcacactgatataggtaataacaccaatcataatggaagataccacaagagaaattgctacaaatgcaatcagcacataacttatcgtatctacgattgttgtgacagaggacattaaagttccaactacatcggtataagtaatgacctgctcatccttcccttctgcctccatcctgctattataatcgtccagaatttttgctacttgttcctttccttcaaaatcctttggataaatgttaatagcagacgggactgcaaaatctacatatcccagttcctgcagattactatcataagaagccaagcctttcccactcatcgacatcataagctccgccagatcatcttccgtcatattcatctgaaatgcgtctgcaaatgctgtcggatcaatctgcattgcatttccgaggctgttctgaagctgcgttcctacattggtcatcatctgtttcattgcagattcaagcccagttgtcatctgactgacaatctgtgtcattgcagaggacacctgtgtctcaagtacctgacctatcgcatttcccatagtccccattgcctgattcatataatttccgatgatttttgacacctggctttccagctgatccatatcgatcattgctgacagaccttcctgaaactgcttctttccatcatctgtttgcagataagccatgaaatgttctcccatcttagacggatccggaagaccattctctgaagcatatgccaaataacctttcacaagatcatctgatagtttctcaagctgttccggtgttatctcaatcttcggatcttccggcataacttctgacatccaatctgaaattattttcttcgcttcatccgtctgaagatattccatcaaatattcatcaaattgatccggatctgtatatcctttttccgtaatatactgttcgtatccggccataatatttttgatcaattcctgtattttctcggttgtaatcgtcacagttccgcttgatttcatgatatcttttatattatcagaaataatcttttttgctgcatccgtcttaagaaatgctgtaaaatcctctccaagacctgaataatctgcctctggatgtgtctttgcatactcctgatatcccgtcagcagtccacaagccatctgtttcataccatccggtgataccttcagatccagattcgaaacgatctctcccagattcatctgcggcattccggaaagatctaagttcagagaatctggattcacaagtcccgacagatccagtgtattacttcctgtctgaaatgcttttgacaaattcatagactcactgagatttaacgaattcccaaaatccagagaatttcctaaattgttcatcgcacttgcgtcaaatccaaatgctttctgcagtgctgcttcgtcaaccgtaaataaagaatccatggagaatccattttcactgtctttctctccgaattttttatttgtaaatacgttaacatccggatttgccagctgctgtttcacaatctcactttttgctgcctgttctgccacatgtttcgtcaatgatgtcggatatgcaattcccggactcagagaggaggctttcgcatcttcagcgggtttcacaattccaaccacggtaagatcttccccattcgctacaagtgatttcatataatcttcattatccgtcttatctttccagacctgatactgactatcatattcataatactcagaactgttcacaagcttgaactttgttccgataatatcatcataagaataggttcccagatcatccggtgtagtaacattttcctctttcataaaggactggatcatctcatcaagctccagcggatcacgaagtcccaatgtataaagcataaaatcactcattctgccattcgaagtcagaaccacaacacattcattatatttttctggccaatgacccttttccacttcatactgattttcataaagtttactgctctccggcatctcataaaaaacatctgtactcatcatagatgacatcatactattcgtacttatagaagaacccaatcccatagcagaaaaggattgatctggattcacctgacggatactgtctttattttctttataaatctgcggagaaacgctgtacttatattctatagcattcgtatattgttccactccactcttgccagtatcaagatacttcttcaaagcaccaaggtcatttgaatccattgtggaaaacatattcgtcaccatctgaattactttaacctgatcctttgactttttctttgtatctgacttctctttgtctgtttttttatcatccgcagaagcactgtccatcccgaccatcatggatgtcagatcaaagcctgtactttgtatctgcagcggatattctgaaagtgtctcttcctctacgttctgaatatattgattcacacctgtagatagagacagaattaatgcaattccgataattccgattgaacctgcaaatgaagtcagaagcgttcgtgccttctttgtcttcagattgttaaagctcaaagctaatgctgtcagaaatgacatcgaggattttcccatattcctgtgttctgccgctcccatcgtcgtttcatctacttcaaacggatctgtatctgaacggatcacaccatcttttaatgtaacgattcttgtcgcatactgctctgcaagctccggattatgtgtaaccataacaaccagacggtctttcgctacttcctgaagaagatccatgacctgcacacttgtatcactgtccagtgcacctgtcggttcatctgcaagcaggatatccggatcattcactaatgcccgggcaatcgcaacacgctgcatctgtcctccggacatctgacttgggcgcttgtgaagctgcgcacctaatccaaccttttcaagcgcttctgtcgcacgtttccttctctcagacttgccaatccccgaaatcgtaagtgccagttcaacatttgccagaacagtctgatgcggaatcagattataactctggaaaacaaatcctatcgtatgattacgataagaatcccagtctctgtctttatatttcttcgttgatattccattgatgatcaggtctccgctgtcataccgatccaaaccgccaatgatattcagaagcgttgtctttcccgaaccactcggtcccagaatagcaacaaattcattatctctgagattcagactgacatcatccaatgctttctgtatcagattacctgttcgatattccttgcaaatatgttgtatctgaagcatgccttctctccttttccaatcactattcagccattattttactattctacaccctgcttggatgaattgtcattcactttataaggatttttcttgatttctatacattttttccataatgtggttagatagtatgtaatacacgagagcattgaaggaatttatcatgaaaacatataaaaaacctgttgtttccgttgatacaggccttgctgaaggagtatacgctgcaagtggtgcaactataaaaactgccagcagataaatttctactggcaggaaaaatttatattttttcaattgtcttcttaacataatcctttaattgcttctattgttcgggtatattctcgttctacttcttcaaacatctctgtagtgttttctttgatttctttgtctcgaagctcttctgttaatgctgagctgacctcgaataactttgtaaatccaagattcatgcacacgcctttcaatgtatgtgcacttcggaatgcgagttctgcatcctgattttcaagtccttcttttaatccctggaaacttgtatcatccaaaaacttcaatacaaatttacggaccagtgtttcacttccaagtcttctcatcacatcatcatagttactatccattacttcatagcattcttctaaattcatttttgtttactccttaattttcttttatttcaatagtcccattaattcttcaaaacagacaccatccgtcaacggaatttccatttcaattgacttttgtatgcacttctttataaatgcggatgcctttcggacagattttgtaaattccactccattaactgcatctgctgcaatgattgcagagaaaatatctcccgtaccacatctggaatgtcctactttatgtgtacggatcatctcgtatcctttgcttttttcatagcacaggttggacacatacgttttctgtggaattcctgtaatcacaactttttctggtccggtctgcacaatctgttctgccatctttgccagctctctcgttgtccaccgttccttatatggtgttcctgtcaggatacatgcctctgtcacatttggaacaactacatccgcatagcggactaattgaatcatctgtctgcacatttcttccgtataagtcgaatatgcctccccattgtcccccatcaccggatcgatcacagccactgtattctcgtctctaaaatactggataaactcactgacaatccgaatctgttctgctgatcccaaaaacccagtacaaattccttcgaacttcagatccagcttcttccattgtccaatatatgcttccatatttgatgtataatctgtaaaataataatcttcatatgcggtatgatttgaaaaaatcgaggtaggcactgcacaacactgcactttcagcattgaaataatcggcatctgtaccgcaattgagcatctgccaaagcctgtaaagtcattgatcagcgcaatttttttctgttgattatgattctgcatcattctattccctcgtttcttctatataaatagatataccaatttaatttaattacaatatgtcatagatgtcaatatttctttttactattttctttcaccttctgtgtaactgccttttctactataataatttcttattaaataatatctgatttgtttatgatacctcaaaaacattctgttttttttacttttcactcaacgtattccacaatcactctctttatttttccgttgtttttatacaaaaaacacaattttccactttttcccttcttcaatgatttttcacacctctcttcccacgttttcagcccgcttgacagtttcccctaaaaagtgtacggttacgttgtaaattctaagaaaattctatgaggtgaaaaaatgcaggaattaaaaccaatcaaagaaggtaaagttcgtgaaatttatgataatggagacagcttaatcatggttgctacagaccgcatcagctgctttgacgtgattctcaacaatgaagttacaaagaaaggaactgtcctgactcagatgtccaaattctggtttgatctgacagaagacattcttcctaaccacatgctctctgttgatgtaaaagatatgccggagttcttccagcaggaaaaatatgatggaaaatctatgatgtgtaagaaactcgaaatgcttccgatcgagtgtatcgttcgtggttatatcactggaagtggctgggaaagctataaagaaaacggaactgtttgtggaatcacacttccggaaggattaaaggaatctgacaaacttcctgaaccaatctatacgccttccacaaaggctgaaatcggagatcacgatgagaacatttcattcgagcagagcgttgatcaccttgaaaaatattatcctggaagaggacgtgaactcgctgagaaacttcgcgacaacacaattgctctctataagaaatgtgccgaatatgctctgagcaaaggtatcattattgcagatacaaaatttgagttcggacttgatgaaaatggaaatatggtaattggagatgagatgctcactcctgacagttcccgtttctggcctgctgacggttatgaagccggacatggacagccatcttttgacaaacagtttgcccgtgactggctgaaagcaaatccggacaacgactggacacttccacaggaaattgtagataagacgattgagaaataccttcaggcatataagatgctgacaggaaaagatctggataaataagatttcataaaacaaacagggacgaaatgaaccgcttaacaagcttttcatttcgtccttttttactacatttctgtaaaaagaaaacgaggatcaactcctcgctttctctctggtttttagtttgttgttttcaccctacctgtgtgatcttttgtgattgctttgattgcaagcagaactccaatctgcagagcaattccgatcacgagacagatgactgcattctgcaagatacctgcgatcacatatgtaatacaggaaactgctgctacagtcattgcatatggaagctgcgtggatacatgatttacatgattacactgcgctcctgcggatgccatgattgttgtatctgaaataggtgaacaatgatctccgcaaactgctccggccatacaagctgagattgagatgatcatcattgtctcgttcgtaccctggaatactgcaactacgattggaatcagaattccgaatgttccccaggaagtacctgttgcaaatgcaaggaaacatcctacaaggaagatgattgctgggagaaggttcatcaatccgcctgctgctgaattcattacagaagctacgaatggagctgctccgagactgtctgtcattgctttcagagtccatgcgaatgtaagaatcaggatagccggaaccattgccttaaatccttccggaatgcaagccatagaatccgaaaaacgaagaacttttcttactacataaaaaacaattgtaattaccattgcaaagaaacttccaagcatcagtccaaccgatgcatcactttcggagaaagcctctacaaagcctgttcctgagaagaacccaccagaataaatcataccaatgacacagcagacaataagtgacagaatcgggaatacaagatcgattacttttcctttattgtaaatcgcattttcggatgtattttcaaatggtctgtctcctgttgtaaaaagatccccttcaatcgcatttttctcatgcgccttcatcggaccataatcttcttttgcaagaaccagtgttaccatcattataactgtaagaattgcataatagttatatgggattgcacgaataaaaattgaaaatccatcctcccctttaacaaatcctgttactgctgctgcccaggaagaaatcggtgcaataatgcagattggtgctgccgtagcatcgatcagatatgcaagtttcgcacgggatacattgtggctgtctgttacaggacgcataacgctcccaactgtaaggcagttaaaataatcatcaataaaaatcagcactccaagtgtgattgttgcaagctgtgcacccgctcttgtcttgatatgctctttcgcccagcgtccaaatgctgcggaaccaccggctttattcatcatacataccataacaccaagaattaccagaaatactagaatacccatattgtaagaatctgtaagtactcccactactccatcctgaaatacatgtaaaattgtagcttccggtttaaatcctgaccaaaatgcacctccgatcaaaattccaacgaataaggagctataaacttcctttgtaataagtgccagtacgattgcaacgaccggcggcaccagagaccagattgttgcatagagctgaggtacatactcggcagatgtatctgcggcaaatactgttgttgaactacagcacagaatgagcagagacatcagaaacacataccccatttttcttttgtttctcatttccttttttcctttcctgtaaacttatgtttattaagtttgtgtgtaagcatagtgggttttgctttggattctctaaacgcaaaaaatgccataggcactctctgctggtgagtcacccatggcataataattctagcgtcatcgatagctctccacacctgtgacagtccggcgtatcttctacatccggtccaggaatcatatctgggaatatcattccttcggcggcttctcctttctctcactgacagtcttcccaagactctcgtcagcaggtactcatatcaccgcacctctatcaaacgtcactatattatcacattctatttaaaaaagccagacttattttataatagttttcatttttatatttctacatttttattaaactcctattaaataaagtaatagctgtcaatactctcatatcaacagctatcactttcgtttcctacactataaaattagtttgttcgaaatccgctcagtacatgatatattcccgtctttgaaggcatccctgcaaatccttcctgattttccaacaataacatcgttccgtctgttgaaatataaatacgataatcttctgaccagttaacaggattttctccctcataataccattcaccacctgtccgcgtactttgtatagacaaataaggatgtccatcctgctgcgtacatgaccaggttccttcataaatttcataaatgatatcactatagtcttctattccgtattctttctcactccaggaaatacgtgcatatccgttgtctaataattctacaaaataatctccaaatatatcactattatactcatctactccgaattcccaacagctgcctatcagatctgcttcctgtatgttctcatgtacatctccataccaatctgtaaaacgacttgcatcacatgctttatagtctgtaaaatcctttgcctgctctacattattctccgttgttggcagccagacatgtccatctgttcccatcatcggcacccagtcagcctgatatccggcttctgttcccatagataccatagttccaccaataccttcgttctccccattacacattaccaggaacggttcgcctgtctcagactgatataaactctccacaatctccgatatccctgtgtcataattcaattccattcgacctacactaaccggatcctcgccacttcgaggtacaatgcagaaaagctccgccggaccatgtccacagattcgatccgtaccgatttctttaataaatgtcattttacttaacaggtcaggatacttcttttcaatccattcctgcacatgatcaacataatccgcctcaacatatcccaggtatgctactgcaaattgctgtaatgtgccatccatactctttcgtagattcgcaagagactcctctggactgataggcttatctgtatctgttgtttcaggctttttccccgaatccggtttctttgttttcttctgtttctttgattccgcatcctccttttcttctttcgaatcacccagccttatctgccctaatcccggtatgtcaatttttatctgacagcccgtcaaggtaaacataagcagcagacaaatcattcctgttacaattcgtctaattctctttttcatagttctcataaaaagtttcctcctatccgttctaaacaattattggaaactcctattccttaactttatcttaccatatcgttatcattaaagatacttaaagttatatatttcccataaacaaaatagctgcttcccctactcagagaaacagctactataatcactgaaagatgattcatctaaaatctgattttttagttgttagaatagaatgaacccatataacggatatattcatcatctgttttatttgcctgccaattatgaacatttgctttattgtgctcacctgcaataacagaaagagattttccaagattgtcaaatgcttcctctacacaagcttccggtgtcatagctgtcttcataacagcttctcctgctggaccgcctggaagattgcttaacaaacttggtgtaattgttgttcctaacgtaataacctcaacgtctacatttgtactctcacattctgctgccacagcttctgtcagtttcttaatgtaagattttcctgcaccatactgtgcgttatatggtgaactactgattgctgtcaaagaagacacattgattacagctccacgatcctgctttgcaaagattcccatgtaatgatagaaacatttcaagaatgtcataacattaacattgatcatctgctcatgcttctcccatggagtatcctgcaattttccaaatgtatggaaacatgcaacataactcatgaatcccatatcaaggtcttttgttgcttcaaaaatcttgtcagtacagtcggactgtgcaaaatctgcacggataaccatgtgatccacaccatatgtttcgctgatactctttccaagctcctgaagtttctcttctcttcttcctaccaggacaacactcattccctcagatgcgattttctctgcaaatgcttttccaacgccttctgttgctccaaggatgataccccactcaccatacttttctcttaatgtcattactttttcctcctagtttaccgatttaaaaaccgaaatataatataacacatattgatagaaataacaatcaaaaacagtatatttttctattattcgtcattattactagagaaaatgtcagccacctcactaataataataaacgctgctggatcaatgtcgtgaacaatatctttcattcgaatcacctgatatctgttcaccacaaaatacaacattgctttatcgcgattagagtatccgcctttggcgctgacacgcgtaataccgcttccaaatgtttctgtcaacaccttgcatatctcatgcggccactctgtcacaataattgcacactttgctctgtcgataccttctacaataaagtcaaccgtcttcaatgctgcggaatacgcaacgatcgaatacaatggaagcacccaactctgaagtacacatccacagataatatataaaataatattatataccataacaaatgttcctactgtaacgcctgcacgttttgcaaaaataaccgccataacttcgataccatccatcgcaccgccatagcgaatcgcaagaccgcttccaattccggagatcacacctccaaacagcgcacatagcagtaaatctgttcctgcaagcggtgaagcaatactgacatcaattggaaagatatctgtgatcagccatgcaaacaaggagtagattccgaccgtatagattgcatagaaagtaaagagtcctccctgcttcttaagtcccacaaggaacaatggaatatttaaaaccaacaagaagaacgacaatgataaacacgaaggggttatctgttcaagtaacatcgatgttcctgagataccactgtcatataatttgaccggtgtcataaaaagtgtaatgccaaaagcgtttatcattccggcaaccgtaagcatcaaaagatttacaattcgaggtttctgggtctgtctcattttaagcgctcctttgtcaaaataaatttaccaatgttggttgatttttaaatcataccacagaagtagttatatttccacagccctcgcacattcattaagagacattttttaatgaatcggtgcttttgtatatgatgacagaggcattttatttatctaatctatgtatattttccccttaatcaaagataatattaagggaattttctcttaatgtattgtttttcccttatttcaagttatattttaaaggaaagaaagtgaggtaagggaatgagaaattttaattattctgaaatcagaaatcaaaaatgggattctgacattctcggatttattgttgctatatataaagaagcaggaaagcaactcccatgcactcgaccttggcaagctgaaaattttaatggcgccactgctacttcttcgcattctcttccagttccagcatgtacttatcaaaatcagacataaataatctgtcctgaataatacgatatttttcaaattcggtttcagcttttgccttggcaatctcagcagtaattttacctgcatcctgaaggacctctctgtcatcagccatcaggaataaatccagacgctttgcccagtcctccattgtcattggaatgtgacgttccgcacggtcctctgccaaatccagataagcagatacaatacgctccagtgaacgcatttctttctctgaaagataattcttcgcaacactcacatcactttttacgatctttccttccgatgctgctgcccaagtggttaatcccatatgaggcttatctgcatcggctcgctcataaatcaactccgctgctgtatgtccatgaaccgcataatgcatcttgttttggacctttgcaaagaactgctttgttgtttttgctgttcgatcataatcgagagctgtagcatagatatctgttatcttctgataaaatctacgctcagacaaacgaatctcacgaatctgctcaagcaaacggtcgaagtattctactgtaagcacagatccaccatttttcagacgttcatcatccataacccagcctttaatagtgtagtccttgacaataccattggcccacttacgaaattgtacagctcgctcattattcaccttgaatccaaccgcaataatcatttgaagattataatgctttgtatcacgagtcacctgacgggaaccttcggtttgaactattcggaaattccgaatagttgcagactcttctagttcactatcagcataaatctttttaatatgttcatttatcgttggcaaaccaacactatataatgttgccatcattttctgtgtcagccatatactctcatcctcatagcgcatctcaatactgtcctgctgttcccccacagaggcaacataggtcaggtattctgcagcactggaacggatggttacttcgtcttttttctttttcaaataagattccctccttattcaaaattcatttagcgtaaatatggcactataacatcatagaatttcttactccaatgagcatggaattttgccatctgaagccagtctgtttcattttcaatgcttacattattaatctgataagaaatcttcgacgatttaatatcatctcctcggttccaaatcaatttcactcctaatgaattttcaattgcatccttatgaagaattacagcatcaaaagctttcttattatcttctttctttgctttgccaaaatacaactcaactcttgcagaatcataatttgccacgcaacacaaactaaaaccactgattccaaagaacccattaatccagttttctttcgatggattaacattggaaaatgaaccaccttctccgtgagtcttctttatataatctagagcatatgtccagtattttctgcgaagctcatatcttgtgccgacttcatcttcaacgccctcattttcatcgcgaagatagaatactaaatcggttgggtcagcgtcatacaacttgaacactctactcaatacagataatttgctttgtgtacttgtattcgtccacacataaataccatcgcctatctcggcactcttagtaaaatcagtctcgttcatgctgaagtgtaatgcgatattatcttctttagatgctgcaagttttgtaataacatttttatcttcagcatatagaatctgcagcactttctggaacatttctacccagcttgttgctggctgttctgtattcttatagctaaagcgtgcaatcaatcttccacttaaattagcatcatcatcaagcgtatatgagtcaagttgtttttcctccggtttaaattcagttgatggagttaaccatatttcaagagcacgtcccataaggtattgattacgctcttctaattctgtaagcgtccacttttctttctttgcaatatatgtattcatgcgaataccactatcttcgaagccatttttcatgattttcttttctgcaaaactactattgctatattttgagttataagcagtcaatgtaagattggcaattctatgcaaccaagtttcatgaatctgctcgtaatcatcacctaatgcctttacccatgctggagttaaatgctgtggcataatatgttcaatagaatatgttccatcatcacaatgactatatacgtctttgtcttctgcagtaccataattctctaaacgctctaaaatataaatcttgtttttgctattcatctgataaacttgtctttcagtaaattgtgtagcaaattcatcatcatccggaaaacgagccttttcttttttagaaagaagtgcatacttgaacttttctacataatttgcatcagtaccatcatatctgatgatttctcgatgaagcttcaaaaatattttgttcaaagcattggtagggaggtcacaaatagttcttctgaacagatagttttctgtaatcagaaatatatctgttacttgagaaatgtccaatttaccttcattatttaaacgcaatacctcaagaaagaacggtctggttactgttgtttccaatcgattcaatctattaatacaagaatccaatgccttattctttgtatttccatttaataagatttcatatcgttttgcataagccagcaaatctttaagtagttcttctactcccaataatgatagctccacatactccttaaagctgatataaatcttcttctgagaagggataacaagctgcttaacactaagataatctcttacaaatgagcttacatcgtattttgtacattcctcgatgcgattccagtacttttcataatactcatcttgctcttttgctggaagccccatcaaaataaagttcctgattttatctccttcactcaagtcaagccccgtagagttaagactctcaaaaataagctgaggattatcctcattgttcaaagtaatattgattatttctaagctgcatatagcatcaaaaagctggtcaattgtgatttcctgcttctggattctgtcataaaaataattataattcatagtcagatttgattctctgatatgctcatcctcactatcaaagagctttccaaatgctttctgatcatttttaacaggcttcaattttatacgcgtatcctgtgtttgatatttatcaacaagaaagtcttcataaatctgctttccaagagatgcatcttctggtacagtaatgccattagatattaaattatacatcgccaaaaatagcaatgacacagttgttaatcgttgttgtccgtcaattacaaggaactcagtatttcttccagaaggttcgtaaacagagacaaggctccccaaaaaatgacttcttctgttattttttattacctttacaaggtcatcgtaaagctgcttacagttttctgtcttccaatcatagttgcgctgatagacaggaataataaagcgtttctttgagccttccatatattctattaatctacattctgaacctttcattaagtgcctccttaaactcctactgcaataagtatttcctcaaaatgcctacatctttcttgatatcacgaggctttatactggtaagcaccttatgctcaacttcaggtgtccagtaaattttcaacttattctgcgccctcgttattgcagtgtagaaaatgttatgagttatcagttcatctatttcatctgttattacaatctttacagaactatactccaatccctgagccttatgtattgaaacagcataagccacttgaaacggaactactgctctcgaattcgaagaatcatcttcatcaacactcttcgttttatttacaataaatctaattatagaattgccattttccgagttctcaagaagttcaaaatcgcagcccattgcatcgaggccgtttattatcttgttcagctcaatatcaaattgaatataaccacttatatcatcttcatcaaacacctgaattccaacgactttccccttcatattattgtaaatcacaggtgaaaatctatcagaatcattaaacaatattggatcaccaatcttatattgttgaattccccatgttactgatgggttaggattgctttcttgtaaaaatctatttatgttattgatgccatatagcccatcgtagtttagacatagaataatttcatcttcttctgctggattgaaaatagaagtatctaaagaaatcgaatattcctgtcttgctataagttccattatggtatcatccatgttgcgaactcttgaccataacgttaatagcccttcattgctgctcctgtatggactattcaattcaaaaacagctgattcaggtataaattttctaacaacagcgaaccagttaccaaaacggatagaattaatctggtatgtatcaccaaccaacaataataattgaaatgttgctttttcaaggactttcttcatatcactattgcttacggtactgcactcatctataacaagcaaatcgtaatttgttctaacatcccgtttagtcaaaaacctttttattgttgagaaagtgcagcttgcagcggttactcttcgttttagattatctactgcaggatttgtctgagataaaaacaacttgtttttttccgagaaaaaatgtgcaacatggttaataagcgttgattttcctacacctgcagaaccgtatactatcgccacttgtgattgagaaaacatctgtttcaatgcttctcttttttcttcactgtcaactccggatccagctccattaagccatgcttctactgtgcctgtataattttgaattccattgacagataacgacttaagttttcgtataatattgcatgtgtcttgtttatagccattgataaaaatctggccattctctattaccaatttactatattctctgtgaccaaaccacaatgcatcattgtactgttcagctagagtaggtatatcatcgaacccaacaatatctctcactgttgtaaataattgtccttgaatctctgtattattacgaaccaaccgtgctaatagttcgtgttttctatccttaattggaatacagtcgaacagtgctcccattctggggttgtgaccaatgggcgaattgataaaaggcattgtatcaaatggaatgcatccattctgcaaataaagctttgaaaggttttcattctttgtcatctgcttttgacatttaatcacaacattattcatgctatacaatagataacgaagcacattttgcccagcactttttgactttattatttttctgcatgatgcaagaacatcaataaacgatgtagagcgcagttcttctttccagcttctaaccaattttcgatattcattatccgggaaatccatcaaatcacataatgaaaagcctgtgcatgacaaaaatccacttatcaccctttgctcaagatatgacggttttgttcttgtaccggtcactaccgatataaaattctgatattcacaatctcttatagccacttcccatccaactataattatgattggcattgttttaccaagcatttctatactgtcgtttacgagatgaaattttgccgcatagttgtctgtgacatttattctcgtaaacgcaatcactctgttggatttactggaataatcattcgcaggcgtaaatgtcacttcatagtaaattttcccaccgacaaaaaatggcttgattttttgaatataatacttctcaccactgccagccaatcgcgtatcatacctatcaactttatttgaaattctttcgtaatactcctgaagatttttgtctacatttaaaggaaacttttcaagattacttagtacctctagtccgcatttttctcttaaaagtattcttgttccaagaagatacttatagtatttcaacataagacgctcagaattctcttcgtccaaagtataatgagatgctacaatctgaaggtaatcatggaatttatataacagcttcaagtctccgcgcgtttgtacaaactctatcgctttacatatattttcatacgtattatcaatgtctcctccgttagcataaaatttcagcattatatgttcaaggaaatttctcaactgtgccaatacgtcttgcgaaaccgcaccacgaggtgaaaaatccgcgcttccaatatgtcgacatatcactcggtcaatattaagaattctatcatctatcgttgacatcgttttctctcctttatcactcttattcaagattcgaactaccgaaaggtatataaccgcaagcttccaacatctcatttatttcgtatatactattttcagcacatgcgctcaaagcacatctataagcatagttttgcggattggtaggtttaatattaaaatctgtctttccaaccaacatttctgcttctggtactgagagttttaacccatagcatagtcctaaaactgtttgaacggtagtcggatactcttcatcatttcttaatctctgtattgtacgttctccaactaatgatgcatcagccaatttcttatttgaaagctttcgctctttcataagctgtaccaatgtttcagagaatgcacctggatataacctcatagcattagcactcttacttgctccttgaatctgagaaagcagtattttattatgcgcattcagctcaaacgaatattcctgagcattaggctgctccggagttttatacatcatttgagtgtaatatttctgtccttgatacttagattcgtagctatatcctttatcaaacacaaaacagcattcatctatgtgggatagagcatactgcgtaagtttgatttgctcgtcagaacgtacgatatatttctcattatcaaggcaaacatgaccttcgatataaacaaaccttccggtatcaatggcttttctaaagtctttatttaaacaatacgccttaaacaaatcagctgatgatatcgtaaatgattgattatccgataaagctgaagcatcaaatgaaaatggcgtaacatactgtccattaacatatgtaaatgcaccatcaatctttgcataacccatttctcttatgcgcatcttaactgcctgttttgataatccatagaaatcagctaattctgaaatcatttcctcgattagataaccatccgtaccatcaaaatgaatatggtatttttctacgagttctgaaatttttatttttgctgtatttgttggcatcaagatacgtggagcaactccattagcttgccactccatccaatccacagccttccacttttctgaatcttttgcgttgctacctatagaacactgtattattttccctaattcatcatttgctccaagcatcttcatcaaagcatgatacggttgatgcctataccaatggaaacactcatgcgcaatggtaaagttcacagtacctaaggttcgttcataatatacacgaggatctatcaaaactgttccacgtttagcatttctgataataatattcttgtttttatccttaatatttccgccttcaaaaacaaccaaaccaaaaatatcaagttctgatgaaagcaacgaatcttctataaccgaaagacccatatcctctgcaatttttctaataggaacagctaccggttcctgtaaagccaaaggataatatttctccaggaattttgtagcttcattttcaaaagcatctcttgaaataatcggtaccaattcaccggaatacttgtcattatctgaatcttcctgttgctcacattcattaatatttataatttcaaaatctgttagttccacgcctaaaagaactttacaccttacatcaagccatttttcagtaaacgaaaccctacccgttgaagatatggaatgttcgatatcacaactaacaattacagaaaagctaatcgcaccatcatctacctgttcaatatggactacattttggatttcaatgtctgatagtgtagctttattctctttcactttttccgtcatataatcaagaacagcgtcttttatctcatcatatcttctttggtcgattaatttttgcaaaggactctcatcctgagcatcataatagtctagtcttgaatcattcaattcttttcgtactgctctccagtttttcatatacatgtccatatatgcaatgaatgtcgaattatgtgtacgttccctcagatgaatcaattcatgtaaaataacatattctaaacattcaataggtttctgggccaactgcagattaaaccacagcttctttttttcagtgttacaggttccccaacgcgtaaccatatattttgtttgccacgactcacagtgaagcgcagtaatttgttcccatttaggaagaagtctttctatctcaacttttaataagctacgatactgttcacgcacatagttttctcgttgcttaaccgtactatcttctctcattgagagaattactttatctccttgaatttcaaagctgttcttttgagcatctggtacaaaagataagtaatactgtttgccccagatgtacatagtttcaccgctaacatactgtcgcttagcacttcttggttgttgctggaacttctcaatttgtttttttatccaactgagattggttcgagcatacacctcgattgccttatcatccattgataatggtgccgaaataacaacatgtccatcaggcggttttatctgaaggtgcatattcttaatattctttttttgaatatcaatcggtatgcccgaaatcacaattctcatctattaatattcctcctgcttctcaataatcttatacagacgttcaacctctgtatcatcattgagaattgcaaacaacgctctcttgattcttctttccttgattgaatccccacgaaaaccacacattttactatccataacagctttatgaagttcaatagccaacacttcatccccgccaacattatcatataatgcttgcatggccttactatgtctcacactttcaggatagtcttcattttcttccggatggtcaacattctttgcgagtttaatatattcatcaagaagttccttataggacaaaacgcccttctgtctatcttgaatcagtttatccaaaatcgctgacatcttttcatagtattttggatttacagttaccttttctaccattttacgacggatattgttttcaattgcttccgccgcaccttctttctgaccagaaggcgtatcttctccggtcatcgtttcaccttgatccattacgaaatcgagaagcgttaggtcatcaaattcaccaattttaatactatcagaagccatgatgtaattatcaataagttttcgcatatccggttcatatgccttaaaatccaagaaatcgccactcttatttccgatagtttgctttaactcaatatagaaatgtactttattctcataagcattaagttctgttgcagaacaaatatcaaccatatactgctttgcttcagcataagcacgaactagactgcttacgagtttatataatttttcacgaaggcgagcatagatttcatccatgtcttcgctcatgccggaaacgccacagaaatagtgaagatactgcaaatcttctctcggagcttcgacaccctcgcataattcttctagctcttcgtaaatatctttgaaatgtttaatagcctcatcacctctgtctttaagaagtccatctacatcttcaggggcatagttctcaaatgctccagatgtgtacttatccatagcattttttaaatttccaaaaagctgcttgtaatccacaatataaccaaattccttggtatcaccatccagtctatttacacgacagatcgcttgaaataaaccgtggtcttgcatgctcttatcaatataaagatatgtacaaggaggtgcatcaaatcctgtgagaagcttatcaactacaataagcaacttcatatttgcaggttcattgacaaacttttcctttacctctttctcaaaatcttccactttcttctgaattgaaactttctctggaaggttgtcagggtcaaagcctaacatgcgaagataaatctcgtatttttcaaaagtctctgtttcgtcatcagcacttacagtgtctgttctgaggtctcctgcttgtggtgtgtaggatgaaatgattgcacatttcttaaacccacgctgctggaagatttcataatacttacatgcagtataaatagaatcagctacaagaatagcatttccattaccatccatcagacgaggcttcaagtcaaaatcctgaataatgtcccaagcaacacgctcaagtcttgaacgtgagctataaatcttctgcatgcttgcccatttctcttttagttttgcctttgctctgcttgaaagagtacgagtcttaacatcaaaccactggtcaatcctatcatgggctgtaatatcctgcggaatatctctatattcatatctcaaatccagtacaacaccatctttaaccgcttcattgtacttatagctatggatatatgttccaaaaacttcgatacttgtcttcttatctttctttaataatggtgtaccagtgaaaccaataaagatagcttccggcataattgcctgcattgctgcatgtaatttaccagactgagttctgtgacactcatctacaaatacaaaaattttaccctttgccttaaaatctgcagggagtgcttttttcaactcatcaatatacttatcataatcagattctgtggcttcaccaccacgacggccaaacttatgcaccaatgaacacaacaatgaatcatcataagaatttaatttctgaagcaagtcatcgcaactcttggttctggtaatcttttcatcaacaccgatataagttttttcaatctgttcatccagctcatctcggtctgtaacgataagcacacgaggattctcttcttcacaatttgcaagaatccattttgaaagccagaccatagtaagtgttttcccactaccttgagtatgccaaataataccgccgcgctgttttgccaatcgcctttgtgtacgcttgataccatagaactggttgtatcggcacaccttcttgattcccttgtcatacacaacaaagttttcaataaggtcaataaaacgctttttatcaaacatctggtaaatctgctgtaaaagaagggtgtccagtttttcgcaataagccatgatgcgtgcatcctctgggtcacgctcatcctcattttcatgaaatccatctggtttccattccatataatatttctctttggtctgaatcgttccatagcgcaaaccttctatttcattaccggccatacaaaactgcatcgtcgtaaagaatggagcgataaatccatctttctgatttgtcaaattctgacgaataccattagaaacagatacactacttttcttcaattcaatgaccgccatcgcaataccattcacataaattacaaggtctggtcttttttcctgacgaccaactactgtaacttcctcggcaatcgcaaagtcattattggtaggtgtttccacatccatgaaataaaccgtctttggtgctccatcggctgtttcctttaccttggcaccatacttcaaaagagaatagactttatgatttgcatcgtacaaaccatgtgtcatatcatctgctgcttttaccagttcagaaacagctccgtcaatcaatttctggctgtaaccgctaaggcgcaagtacgcacgaagacggtcttcacggatgttcttgtttgcggcatcttttaaattgcctacgtattcataatcaaggatatctctatccttaaagaagctaaccacacgatcttgggtagctctttctgtgtcgccaatactcatgcgtacattcctcctaaactaatcgtattttccctgtaagcaagtcgctcatcataccttttttaatattcgaatatttatcacacttacactgataaagagtgatgagatggtcaaggttcctaaaatagagacctatttttctttgttcatcaatttccgctggtaaaattattttcaaattttgttgagctgtgattccaatatatggtcttgtagattgtgccgctttagtttttaactcagtttggaaatctaaagaattaaaaaaggaatacaaatactctctgtttaaccgttcttcattcttaattctatagtaagtaacctgaggtgttaacattgcatattccgtcatcaaattgcttaaaatagcagtctcgccaatagttgccttgtgtgttagtaggacatcgccatttcgtgcaaatcccttatcaagcctttccgctctttcttttgtaatatgtttgcatgaataaatatttacttctccattatgaatatccgatgccatcaaaaaaggaattccagaatctacatactcatccgaagttggatgtttctctccgtggtttccatctaaaggtgcttccaaaattccctctttaacaagttcccccaacttacgctgttcccaagcttcagtaaatcctggcaaacgcatttctggaactgtgtcatccttttgtggaaacattttcgataaacatccatttttaacaagctttatcttatttacaacttttgtttctgctgtcattaataactgtattttatttaatgattgtactattttctcctgttcatcaaatggaggtaccaatatcaacgtctctgaaatagctccttttgatatagatgacacttttatacctgttatatatggcaatatttgattgtgaaataaatcggaattcatgtaatatcctaaccaccccggagcaaaatcaccttttttcactctacatggaatggtatgaagtcctgcaacaagtttactatcaccgagattctgtacctcaataacttttccaacagtttcgtcctctgccgtatctgcaacaacaatgtcaccgtcctgaagtaattgagtcgatgaggataacagagataactcatttatgtatggaatttcttcttcgttacaatccaatacttccggaaactttgttaaaatatcaccataatgaatatttcttacagcaccaccacaattatttaaattttcacgtgacagagtgttattggatatcaccctaaacgtttcgtcaaatgtttggagttcccagtctactggaatatcaccaatctccgtatgttttaattctcttaccatttgaagcccatcctctccagatgactcttgacctttgcctcatagtcagcagtctgcttcataagatcaggaagagtattttcataacgtttagaaagttcaataatgcggtctgcaagctgatgggagattgctgcatacaaatcattaatacctgtaccgatggtgtaataccattttttatttaccagtaaatctatgatttcatcgtctgttaaagttgcatatctctcacgagccttctcatcaagttctttattcatctccttggtaagctttgttgaatcttccaatttcttagcaagttcatacgcaactttcaactctgcataatcgtctgcataggcttccggtactggtgcttctgcccgtgccattgccaatgcatatgcaacagacgactttgtcacagtgcctttttctgtataagccacttccaatataatgttgtcattgatatatgcaacatactcctttttcttcataggaagcatgccctgcaatttaacaagtccatcaatcagaggtgtatgaacatggctcataatttcatccatcttctcttgaatgtctttgctctttacttttccaccttctgacacttcagacaaagtggaatcctccgcagattcttcaactaaagacataaggcgagaatctgtttctacaacaaaatcaacaaggtcatccatcgcttttttctcttccggaaaaagttcggaaataataagcgctttgggaataagttttccttcccatcctgcaactttcaattccggattcccatcatcatcttttttctttgtttctttcataatgttttctttttctcttgcaacgccataaccagcttcgtcggagataatcatagaaacatcatcactaagcacttcattccagtaagcaagaagtacctgatatacatcatatttattaataagtgaaaggctctcaaactctttcaatatagcttgagccaattcaataatcagttcttttgcagacacgccagccttcaaattcttaagtttagaatctacgtaagacttccaacttgcgaatgcttcatcaatcatttctccataagcagcaaattctgcgttagagtatgttgtctgacgaatcacatcttcttctacattcagcttatagtatccttcactaaacacaccaagaagttcattcttcagagtcgggaatgcagtccagaaatgttctagtgcatcaatatccgctgctggtataccaccgtgaatatgcgcatagatatcctgaatatcttccggttcagaagaatcaatgtaacgagaaatatttaagttgtacccattcttttccttaatttctttgtttggtacaaaacgagcatatttaggatctgttgtaatctgctcattaaaagtagttacaatacgataaatatcctgttcacggagtctgttcttgcttccatcttttacatagtccttgcctgcatcaatcataaatataccagcgcggttttccgcaccttctttatcaattacgagaatgcaagcaggaatacccgttccgtaaaataagttcggaggcaagctgataattcctttaatccagcctttatcaacaattgtctgtctgatagttgcttcagcatttcctctaaacaatactccatgaggaagaattactgctgctttaccagtagacttcagggttttcaaaatgtgcattaaccacgcgtaatcgccattcttttcaggtggtctatccccatatccagaaaatcgcccaaactcttttaatccatcggaccagtttttaagagaaaatggagggtttgccacaatataatcaaatcgctcaagttctgatgggttatcattttttataaacttaggatctgagaatgtgtttcctgacataattctaattgtagctttgttatgaagaaccgcattcatctttgccaaaccagctgtagaaccatctttttcctgaccatagcctgaaatttcaaaaggagcttctgctaatgctctgattaacaaagatccacttccacaagccgggtcacatacggttgcatcatggtctgtacacttatcgataccgataatttttgcaagaattcgagacacctctgctggagtgtagaattgtcccttactctttccactttcagacgcaaagttacgcatcaaatattcgtaagcgtcaccaataatatcgtcgccttctgctttgttttttgaaaaatcaagttcaggacgctgaaaaattgcaataagcttagtaagcttatcaaccatctctttgtctttacctatttttgcttcatcattaaaatgagcaatatctataacgcccttcaatccttcgtttacttcagctaggcgagctataatcttatctataccttcaccaatgtttttcttattttttagtgctataaaatcatcaaaagaacagcctgttcttttctcagggtcaggattcggatcatttgccttatcaaaaacagttaaatctccgtatttctgtcctttgtatttatcagtgacatacttcataaataaaagtgtaagtatgtaatccttatattgtgatgcatccatgcctccgcgcaatgcatcgcagctcgcccaaagggagctgtatagctctgttttctttactgccattgccagaatctccttgtattttatttactgtatcaattactcgatagcactttttccacttttaacccacacatcaagttcagaacatttaaacttccattgcttcccgattttgtgtgctggtattcctttatcattacgtatccatcctcggagcgtcactggcttgacacctaggtattcagcagcttcttcaatgtttatccatttatcattcaacttatcttccatatttcacctctcgaagttacatatagatacaattacccaataatattatagtcattttcgccagcaaaaacaagtagtttcttgttatttgtttatatttgttattatttttcttagaaaatttactattcgctcatatttgttttttggtagccggacatgtatatgtccggtcttttcttctgtaaatccaggattttcaatcattatccgttccatcaatcatctcattattcctaaaaacggacataggcatgtctgaggtttttattttgaaatctggcatatttaagatagttattaaaaactcgtctcggacaagacgttaaccagtctgacttgttcatcaactcaccatcttcgtggccacgtggtgtgttcgtagttgataaacaagagaacattattaatagagtgccagcttacgaacggctggtcaccggaaagaagcggagttatccgcatgaggtgaccatcttatgaaaaacactggcagccataacggttatctccgcttcaaacatgaagccaatggaggtaaaaattatggcaaacaaagacaatcagagtaaaccatatcgtatctacatcaaggaatccaagagctgggtggatgtaaacaaggaattctatacgaactactatcgtgacatcaacgcctatcgcaaacgtcaacaagagcatggccgctgtgtctgccctgcaagcaagcgttacttatgcgacatggattgcttaacctgtccttatgccaaagctgacgatcagctttctctcgacaacaccattagcgacagtgacggaaacgaaaagagctggcttgatgatatgccagatgagtctacagctatcgctgaagtattagaggatgcagaactttttcacgctctctatgcaaagctgaataagctggacccggaaggtcgtcttatttgtcagcttattatgcagggaaaatctgaacgtgactgcggcaaggaaatgggactctctcgcaatacctttgtatatcgtagggacaagctgttcaagaagctccgttccgagcttaaggactacatctaatatgaatggtcgtcctctgattcttcaggggacgatttttcttttcaaaaaagtttcttatattttttcggccaaacggcaatctcacctccattgagtagtgtaaggcgaaacaaagcgacctacagaaagcgaggtgaacatcgtgaatcgaacttttcacaacagaagcggcactgacgcagaagtgattgctactctcactgcaaccagccaggtatccacaagaatggcgaagaatctcagaatcatcgccgcacacaaacaatccgaggaaggagaaacagtaaatgtcaaaaatgaacgatatggctatgaccatcgaagagctgagaaatgctgccactgctattaatgatgcagcaaactggctcgcacagcagttttcatctgatgataagcagcaagctgaagatatttctgctagacctgaaaagaaaacaaaacctgcactgactctcgaggaggttcgagctgttctggctgataaatctcgtgccggacatacagctgaaattcgagaacttcttaaaaagtacggtgcaagcaagacccgtagacccgaaacattatgaagccctgctcagggaagcggaggtgctctaatatgccacctaagggacatgcaatcctctccgcatcctcgtctgaccgctggctccactgcccaccgtcaacaaggctctgcgaaacctacgaggataaaggtagtgattatgctgcagaaggcaccgacgcccactctctttgtgagtacaagctccgcaaagcactcggcatgaaagctacagatcctaccaagaatctcgactggtataacgctgaaatggaggactgtgccaccgggtatgcctgcttcatcatggagcttttggaagaggccaaacagacctgctccgacccggttgttctgattgaacagcgagtggacttctctcgctgggtggaacagggcttcagaacctcggatgccattctcatcagcgacggcaccatgcatgtaattgactacaaacatggtcttggaatcctcgtatccgctgaggacaatccgcagataaagtgctacgcccttggcgcactggaactcttcgataacatctacgacatcaatacgatcagcatgaccatctatcagcccagacgccagaacatttctacctacgagatcagcaaagatgctctttatctgtgggccgatgaagttctgaagcctaccgcagaccttgcctttgccggtgatggaaacttcctgtgtgcttgcagcctatattgaaaagccacaaggcaaacctactcttgtgccggagagtgataagtgcccggcaatgaacacagccaaaaatgattttatggagaaatatgacaatgagtaaaaatgcaaaaatgacaaatcccatgaaggttatcactggtcctaacacacgctggagctacgtcaacgtctgggaaccgaaatccatcaacggtggcactccgaagtacagtatcagcctgatcatcccaaaatctgacgccaagactgtcacaaagattgaagctgctatcgagactgaggtcttaacaatctacagaaaatttgtgatggtgagcctcttggtggtaaggcttttgctgaatctgactttgcaactgatgacgacgatgattttcttaactaacggaggtgacaaactatggaaacaattatgattagcacaattcttgtaaacatctatatcggctgcttcgcgtgtgttggccttgctgctgccatctctatggttcagagtatcatcaatgaccacaaacacgaaaagcgtgagcaggaaaaggacaagcgtgacctcgaataccatgaaaaacgcacgaagaactttaagtaatctatcaacctgctagcggtggttttactgccgtcagcacatctttcaacaaaaggagataatctacgaatgaatttgcagaaatcttaaatctatttattgctaatgtcatcgcatacaccttttttgtagcagtatatagcttcatcatttataacgtagggaaaattattctttatcttatccgctatgcggtataccatatccgccgtgacatcaataaatacaaatccaataaagataaacagtagcacccggcggcagggatttctctgctgcctgttttatagaaaggacaatctcatgaaaacacttagcattgatattgatacatacagtcagcattgatgtagatgcatgagttccatagatgcacgaaaccctcctgaccatgatggccgggagggttgtctgttatttaccccaaggtaaaaattctgaaataaaatatggaatctgattagcattgaacatccatgaaatcacaataattatagcaataaccaaacacgcaatattcaatgccttaatattgaacagctttgcattcttctcatttatagtaaaaatgaatttaaccaaaatataaattacattgataagaacaaatgctaagaagtcaacaaccaacaacaatcgaaaaacactaaccgcagaaatattttgcaaaactgaggttgaaaatgtaatacccccaacaaaagcaagtacaattgcagcaaaaataccaagtatagagatgtattctttttcaacaccttttatctgcttttgcagattttcttttgcttcttcaatgctatctgcaaaaatattattaacattttcaatctgatgcagagccaattgaaaatggtcataaatcttcacaatcatttttttacaatcttcacttacctcattattgtcatcaagtgaataaagcaacagtttttccaagtttgtagcaaagattcctctctcagacatttctaatgaatagacataattgcttatctctgaatatagaatcctatccaatttatttgttgatgtaatatatgcagatatattttcaactgttttctgcgggtcatacttctgagtattcatggacaatgccttgcaaattccattgatcttccttttagtattattgaatttttttgactgctccaatgacattgttgtattgtctgttgtccggagcaatacatccaaattatcatcagccattaaaatactcccttattgcattgattgtaatctcgttattttggtatggcacatacgcgtcaatccatggcgattgtctatgagtcaatgatacaagatctgttgctgagtaatctgcaaacttgtctataactttatcaataagagctttatcctcatccacaatggttgtatcctcaaattcaatccttttagagttccatatatcattttcatcgaacataatatatgattctattgcaggtatatccccacttccatactgcttatactcatggtatgcttctggcacaacaggtccaaagtcccatgcttcaatcttctcatcaaaacaaggcgtgtggtctttcttttttgtcagaaaataagcctgaataaaataaagcactttttgaagttttaaatttgaaattccatagtcatgctcattgctataattaattacatgacgacaaacatctaaaaccttatagctcatcatatcaacctccttcctatgtaaatatatattatatcactattattatatttttggtgaactttttgaaaattttatcattatccattccactgccaagtctgcctcttaatatcgagtgtcttaaactgcggtcggttctaacaacaatcctagtgccacaacctatgacatctaatccacagcctaaatcctaccgcattttttcgaccatccactttttctccaatcagaccgaaaaatagatatgtttccatacaagaaaaccgagcttttcgcaaggcttctctgatgatgctcacttcgcaaaaagcccggaaatacgccactttttggctattatttatctttccttgacagcaaacagacggtctcgacgtgcacggtctcgcagaactgatccaccgccgtcatcttctccacgcgatatcctgccagctgcatcatctccaaatctcttgccaggcttgtcatcttacaggaaatatatacaatcttatccaccccataattcaagatcttcgggagtgccttcgggtgaattccgtctctcggcggatccagtacgatcacatccggcttctcttcaatctcatcaagtaccttaaacacatctccggcaataaatctgcagttggaaagtccgtttcggacagcgttttcttttgctgcctcgactgcttcttcaataatctcgacaccgatcactttcttcgcaaccggagcaagcacctgaccgattgttcctgttccgctgaacagatcgaatacaacctgattatcaatatctccaatgtattctcttacagtctcgtacagcacttctgcaccttttgagtttggctggaagaaggaaaatggtgtaatcttgaattccagtccgagaagcttctcataaaagaagtcctgtccataaagaattcttgtctcatcactcttcacgacatcagacagggagtcattcaatatatgaaggattccaacaatctttccttctaattctaatgccaaaagttcttctactaatggagttaagtcatattcttcctgcgttgtcgttacaagattcacaagaatctcgcctgttgtatcgcctcgtcttaaaagaagatggcgaagataaccgacatgctgcattttcttgtaataacttacatttctttctttgaaataattcagcacacaaaggagaatcttatccatatcttcatggacaagctgacagtctcctgctgtcagtacatcataagtacttccttttttatgaagaccgagagataacggaccgtctttgaattcatctccaaaagaaaattccatcttgttacggtaatggaattccttcggactgtgcttcacaccttcaaaaacatattcaccttttactaccggatccatgattctgcggatctgtccttctttcatcttcacctgttcttcgtatggcattgtctgatacatacagccgccacaggcaggaaagatactacagaccggctctcttgtctctaatggagatttctccaacacttcaagaagtcttccttctgcatttcctcttttaaatttatttatcataaaacggatcttctgtcccggaatcccatttttcacagtaacatactgttcttcctccggaacaaatacaatccccttgtttgggaaatctacacgttcaataataccctcgtagatctgaccttttttcatcctaatctcctatcaattctaatctattttaacagaaaaacagacaggatggtttcttctctcaccctgtctgcacttttgcaattcactcaagaattatacctgatcatcctcgctgaagtaatcatcaaaatcgtcatcaaaatcatcttcaaaatcatcaagataatccggtgatacgaaacgatatactgcataagcgattgcagctactgctgctactgctccgatgatagccagtgcccagattactgtattcttctgcttctcagcctcattcttatgaagaatctcgttcaatcttgtttctgcaatgatgtcttctattctcttgttcatattaacacgtcctttcttcaccttttgtggtgacagataatctgtgtttattataacacctgacgattcatattactactgatttatcatttttttataactttctcatacctttacaagcttggcgaatttggcaaacatcttgcgtgttccgacactgtcaaattcaatcgtaacctcgtgatctcgtccaccttctttgatatccgttactgttccttccccaaacttcacatgacgtacccggtctccgacctcataaccaagtggaccattcccacctgctgccagctgacttcccttctgcagggatgccagtgcctgacttcctgtaagcggcttacccaccccctgattctttacaggtgtcattccgccaagtgctcctgcgaatgcctgtgcccgaaatgcttctctggcacgtgcatatgtattctgctgtgctggcatctccgtctcctgggtaaacttcttatttcctgtatcaagcagttccctcgggatctctttcacaaatcttgacatcggattgtactgtgtctcaccgtgcaccattcttctgcgcgcacttgtcaaagtcagttcctgctctgcccttgtgattccaacataacaaagtctccgctcttcttccagttcttctctgtctcctgcattaatactcatatatcccgggaaaagcccatcttccatccctgcaagataaacacgtggaaattcaagtccctttgcactatgtaaagtcatcagaacaacatattcctggtcttcatccagactgtcaatatccgcaaccaaagcaacttcttcaaggaatccgctcaatgttgccttttcatctttatcctgacaactttcctcataagttgccgctttactgatcagctcgtctatattctcttttcttgttttcgcctcttctttatcttcattttcaaggctttctatatatcctgtcttctcaatcacttcctgtaaaagatctgtgatgttcatctcttctgccaacgtcttaaaatactcgatcaatgccgcaaaagagtccagttttgttgcacttcttcccactcctgcgatcagccccggtgccagtaatgcctcataaaacccaattccacgttctgttgcagactcctgaatccggttaattgttgtaagaccgattcctctctttgggacattaatgattcttctaaccgcaacatcatcacgtccattatcgattgtcttgagataagcaagaagatccttaatctctcttctcgcatagaaatttacaccgccgacaatcttataaggaatattcatagcaataaatttctcttccagcagacgggattgtgcattcgtacgataaagaactgcactgtcattataggaacctccctgtctgacagcacttttgatatcttcgcctatgaaatccgcctcatcaaatgcagtatcaaactgacgcggacggatcagttcgccttctccgttctccgtccaaagtgatttctcctttcttccgcggttattcgcgatcacactgttcgctgcattcagaatattccctgtagatctgtagttctgctccagtttgatcacctttgcatccggaaattcatgctcaaagtcaagaatattccggatattcgctccacggaacttgtagattgactggtcatcatctccaacgacacaaagattcttatattttcctgcaagaaggcttaccagctgaaactggactgtatttgtatcctgatattcatctaccataatatagcggaatctttcctgataactctcaagcacatccggctgtgtctgcaaaagctgcactgtctttacaagcagatcatcaaaatccagtgcattattcgctctcatctgcgcctcatactcgcggtaaaccttagcaatcttcatctttgcaaagtctcctccggcattcagttcaaattcatccggaaggatcatctcattcttggcagatgaaattgctgaaagcagacttctttctttaaacactttcgtatccacatctactttccgacagacttccttaattaatgtcttctgatcatctgtatcatatatagtaaaatgattctcataacctaatctgtcaataaatcttctcaaaatacgcacgcacgcagaatgaaatgtgctcacccatacactttctgctccaaaaccgacaagcttatccacacgttggcgcatctcttctgccgctttgttcgtaaatgtgattgcaagaatattccatgggttcacgccacgttctccgatcagatatgcaatcctgtgcgtcagaactcttgtttttcctgaaccagctccggcaaggatcagaagaggaccgtccgtgtggtaaacagcctctctctgtggttcatttaatttatcataaatgctcatctttccactcctttaaagttataaagatatctgtaaatgtattcccattatcaaacacacgttcctgtttgtcaactacattttccggccttcttatcttttgcttgctatctagttttaaatactatataataaatgtattgaggtgataacatgaatatagacacaagtaatctgttaaacagcattttagaagaactttcttctttaagttatgtgcatcccggcgatgttccgaatattaatctttacatggatcaagtaactacttttatggatgagcagctggcttcaaccaaacgttaccctgatgataagatcctgacaaagaccatgatcaataattatacgaagaacaatcttcttccacccccggtgaagaagaagtattccagagagcacctgctccttctggtcttcatttattattttaaaaatatcctttcaatcaaagatattgagacagttcttgcaccgctcacagagaaatattttccggatggaaactcttttgaattagcggatatttacaaagaagtctgcaagattgaaaaagaacagctggattccatcaaagagaatgtaactgctacttatgagaaatctgctgagactttcactcatcttgctgatggcgaagataaggagatcttacagcagtttgcatttatatgcagcttgagttttgatgtatatatcaagaaaatgatcattgaacggatcattgatgacctctcttccaagtcttcaaaaaacgaagagaaaaagaaagggaaataaacatttctgtttaaaacgagatacagcctgcgaaagactttatcaggatcttccgcaagctgtatcttttgattgataaaaggtattttattgtaagcttaattcttaagtgttattcttccattccattcccttcctcagcaagccctacgcgtttgaaaaccatatcatatccgtcattcccataattaagagaacggttcacacgactgattgtcgcagtggatgctcctgtcttctccgcgatctccaaatatgtcttctgttcacggagcattcttgccacttcaaatctctgtgacaatgaaagcagctcattgatcgtacagatgtcttcaaaaaatgtataacactcttctttattctcaaggcttaagattgcctgaaacagataatctactgcctcggttctgatcttcttactcatacgaaacaatctccttctcaaccggctaattatatgatggcttacggcataccataaaccataacaataccttttgccttctcaggccactttttgattttaacacattaaatttttaaagtccaccatttcttatgaatttaaactaaattcttgcacaattttgatttttttctaaaacattttatgtaaaacacacttttttcgttgttcttcctcttttaagatgctataataagtctgttataaatattttgatacaaaagagaggagtacatgattaatatgaagtgcccaatatgtggaaaagacctggatttgcagaataagcagattggcaccagcgaaaacggggatccaatctttaatgaatatgcaatctgccatagctgtaaaaagcaatggaaccttgataaacaacgtgcaaagaagatcgctgccaagaaagctgcagaagagaaagcaaaagctgaagctgccgcccgtgctgctgaagaaaaagcgaaagctgaagctgccgcccgcgctgctgaagaaaaagcgaaagctgaagctgccgcccgcgctgctgaagaaaaagcgaaagctgatgccgccgcccgtgccgctgaagagaaacgagctgcccgcagagaagcaaaagcccgcgcccgcaaagaagcgattgcccgccttgctgctgacaaagggatttcagaagaagaagctgaacgtattcttaaggagagagccagagcccgcaaagccgctgcacagaaagctgccactgatgccactgccactgataattccgaagagcagaaatatgggaacattccagcggaagaaatccgtgataagcgtgaaaaagcagttcgcaagggatacgaagatatgcttgcaactgaccctgacagtaaagctgccaagaagaaaaagaaagaggaagccgaaactgcgaaagcaaaagaagatgtaaaatccagaaaaatggatgactatgatgatgaagatgatgatgaatatgaatatgtagacgaatatccacgtttcagacctggacgcatcatccttggaatcatttccctgcttgcatttggtttctgtatttataaaggtttcgtaacaggactcagcacatcaggagctgacgtaacttctgctccaggcatgaattatgtcattgttgctctttgcatgcttgtcactgcactgttatacttcatcatgaataaccgtgatacactttttgcattccttatcccgatgattgtctatatcggtggtgctgtttttgctttcctgaaacatggagatgaattcgagcttctgattttagccggtgtaagtggtgtacttgctgttatttcactgattctcgcaattgcttcccgcggtggagatgattacgatgatgaagatgattacgacgatccatttgaagaagaacacgataattaaaatcacgttgtaaatctttttggtttctaagaacaatttatataagataattacaagggagtatcattttgcggtacttccctttttttgtcctgatatgcattttttatatcatatatctaaaatatttttaggtgtcaaaaacttttttagaatagttgttgctttttgttgaatatgtgataaaatataaccataggtatctttatataattaaaaatacacaacaaacacatactcctcaaagatttttctttggggattttgttacaaagaaaggagtaactgacatggcatcatttatagtaaatggtcaggaagtctcaccttcaaagaatcagaaactgttacggttcctgcgtgatgaactgcacattacctctgcaaaggatggttgcagcgaaggcgcttgtggagcctgtactgttatcattgatggacagacttgcaaatcctgcgtacctgacacagattcattggccggaaagaatgtcatcacagtcgaggggctttctgattgggaacagaaagtttacacttatgcttacgggaaggcaggcgctgtacagtgcggattctgtattcctggtatggttatgtgcacaaaagcacttttggatgtaaatccggaaccaaccgatgatgagattcgctatgcgctgcgcaacaactattgccgctgtacaggatatgttaagatcatggacgcggtacgtctggcagctaagattctgaaagaaggagttttaccagatgacggagatcctagctggactcttggttcccgtgtttctcgtatagatgttgaagaaaaagtgcttgggacaggtaaatatccggatgactattatccggaaggaatgctctatggcgctgctcttcgtagtaaatatccacgagctcgcgtactttctattgatacctctgctgccgaggctctgcctggcgtagaagcggttgtaacagccgatgacattcctggggagaataagatcggacacttaaaacatgatcagtattcactgattccggttggtggactgactcattatctcggagatgcaattgcccttgtagctgcaactgacatggcaactgtagaaaaagcaaagaaacttattaaagttgaatatgaagtacttcctcatgtgcatacagtggaagaagctgctgctccggatgcacctcttgtttatgatgaagaagagactaacgtatgtgcttataagcacatcagccgcggaaatgcggaagaagcaatcaagaattccaagtacgtgatctcacatcactttgagacaccttggactgagcatgctttccttgaaccggaatgtgctgtttctttctatgatgaagacggtgacattttcgtatattcaacagaccagtccgctcaccagacactacacgaagttacacttatgcttggaacagataaagtaaaggttcagaacgcattagtcggcggtggtttcggtggtaaagaggacatgactgttcagcatttaagcgcattgcttacttacgtaacaaagaaaccgatcaagatgaaattatccagagcggaatccttgcttgttcatccgaaacgtcacccattctacatggatatgacaatgggatgcgatgagaatggagtgatccagggtgtaaaagcgattgttaaatctgacacaggtgcattcgcttctcttggcggcccggttcttgaacgtgcatgtacacatgcagcaggaccttatcattatgaaaactttgaaattgaaggaactgcctactatacaaataacccacctgccggagcattccgcggatttggtgttacacagacttgtttcgcaacagagacacttctgaacatgatggctgacaaggtaggcattacaccttgggagattcattaccgcaatgcgatccgcccaggcgaagtacttccgaacggacagattgtagataactctacaggtcttgtagagacactggaagctgtcaaagaagagtatgatgctgcactcgcggccggtaaggctgttggccttggttgtgctatgaagaatgccggcgttggtgttggtatcccggatacgggacgtgtaaaattaattgttgaagaagatgaaaaacttcacatcttcactggtgcttcctgtatcggtcagggacttggtactgtacttgtacagatgatcgttacaaatacagatctttcccatgatgatatcgtctatgagcgaagcaacacatggatttcacctgattccggtacaacttccggttctcgtcagacacttgtaactggtgaagcatgccgcagagcatgtgaaaaattcatggaagcgaaaaacagcggtaagtccatgaaagatatgattggagaaactttctacggagagtatctcgctaagactcatccacttggtgcagatgtgcctaatccgatatctcacgttgcttatggatatgcaactcaggtctgcatccttgatcctaagacaggtaagattgagaaaatgattgccgcacacgatgttggtaaagctgtcaacccactttcctgcgaaggtcagattgaaggcggtgttgtaatgtctatgggattcgcactcagagagcagtatccaatcgatgaaaattgtaaaccaattgacaaatatggttccttaggacttttccgttctcacgaagttcctgagattgaagcaatcgttattgataaacctggtctggacgttgcctgtggagcaatcggtatcggagagatcacatccatccctactgctcctgcaatcgcggatgcatattgcagatttgacggagaaagacgctacagccttcctctttctaacacaccatacgaaaggaagaaataatcatggcaattaaaaagagatttccttaccgggcagctctggttgcctgtaacggtggctgccgcgcagccggctctgaagacggcggatgcaaagatggctgcatcggatgtggagcctgtatagaaaaatgtaaattcggcgcaatttccatgaatgaatatggcgttgccgaagtagacgaagaaaaatgtattgcctgtggacagtgtgcaaaagtctgtccacagaacctgatcaagattcacgaatgtgcaaactacattgtagtaaaatgctctaacaaagaaaaaggagctgttgcacgtaaacagtgtgaagtcagttgtattggatgcggtatttgtgaaaaaacatgtactgcaggtgcaattcatgtagaaaataattgcgcagtaatccaggaagacatctgcttaagctgtggaatgtgctctgtaaaatgtccaagacatgtaatccatgatctccgcggagtatttacagcagtaagataatacaaaagctatcgactacgataacaacacagatatatgttaagttattgtaatcgatagcttttttatctactcatcttcatccagaaactcgatatcatcatcgtcatcaagataatctaaatcatctaaatcatctaagtcatccagattttccagatcattcaagtcatctaagtcatccggatcttcatcataatcctctgtcgtatctgcctcatcaacagttacttcaatttcgacgtcttcctcccaatcttcctcgtctacatcaaacttctcttctttaaagttctccacttcatcctcttccagatcatcttcaagatcatcaaattcatccatgctgacaactgttgtgcccttgtcttctttcaggacattttccggaagactctctataatctcatccagctcatcaaaatcatccagattctcaaccagtgcccttgccttctcgacttcattttctgtagaatgttcttcacggatctctgcggctttaagtaaattctttttcttacgttttccggattccaaaagaagctggatccagatactaagtgcaccaattgcagcacaaagtgccacatggatcattccgtttttatatggctgcagataaaagatactactgcccgctgccattgctccaaacacagaagaagaagcaatcagcataaagttatgaaacttaatagaaagcaatgcacacacaagaccaatacccgcacagattccatagataataaaatcctgtggtttcatcaaatgtacactgacaacaaagacgagtaccgctactgtcacaaatccaccaatctgcttcttccatgcaccaagcaccgccaatacaagtcccacacctgctcctgccgccaatgcgattgtctgatccagatctgcaatcgctccgaccgcaattccggctgcgcatcctgctgacaatcctgcgatcacagaccagaaacgtaccagtttcagccccgtcagacataacagtaccgctccggccattataacgatcagagaaataaattccatctgactcaaatgatgactgctttcattaagtccagccagaacaacatccaggtcaaaattcagaattgtatcaatcatatcatttacattcattatttacaccttcgtcccttactatttattactcactactgctcattttagcaattttttttactgattacaagtgttcatttcacctttccattgacttcttattcttctccacttaaaatagaagagaaatgctattgctgaccgcataatactgtgaacagcaataaaatgctaacataaaggagtttattatggaacagttaagaatacctgctggctatcattcccctcttacaattcgtgagacagaagtagccatcaaagaagtgaaagaccacttcgagcgtgctcttgcaaagaatctccacctgacacgagtgtcagcaccactgtttgtccgtccggaatccggtctgaatgataacttaaacggtgttgaacgtccggtttcctttgacatcaaagaacaggatggttctgttgcagagatcgttcattctcttgcaaaatggaagagatatgcattgaagaattataatttccattccggcgaagggctttacacagatatgagtgcgatacgtcgtgatgaagatacagacaacatccattctctgtatgttgaccagtgggactgggaaaaagtaatttctaaggaagaacgtaacacagagacacttcagtacactgtccgcaaagtctaccgggctctgaaagatacagaagaatacatttccagacgttacaactatattgatcctcttcttcctgatgatatctttttcatcactacacaggagctggaagacctttatccggatcttactaccaaagaacgtgaaaaagcgattgcgaaggaaaaaggcgcagtgtttatctccaagattggtggagtacttgcttccggcgaaagacatgacggtcgtgctccggactatgatgattgggagctgaacggtgacattatcgtttactatccggttcttgacatcggtcttgaactctcttctatgggaatccgtgttgacgaagactcattaaaggcacagctaaaagaagccggatgtgaagatcgtgcagaacttccattccagaaggcactgctgaacggcgagcttccatatacagtcggcggcggtattggacagtcccgtatctgtatgtattacttaagaaaggctcatatcggtgaagtacagtcttccctctggcctgaaaatgtagttgaagctgctgctgatgccggcattcaccttctctaaacacaagacagaccagtcaattatatgataaaaagcagattcgaattctactggagcatctctcctttgaattcgaatctgcttttttcattctcctcttattctacaatcagcaactgttctttctcttcctcagacaccctgttccaaaaaacattaaaatcatcaaattccggcaaatagatatctgccgtattccagatctgcgccagattcttgtcatttgccttatcataaactgctactgtcttaaatcccgcatgctttgccgttctcaaagcctggtaagtatcttcaaacacccaggtctgttccggctccgtatccagctgcaaaagtgctgcaaaataaatatccggctgatccttaccgcttccgatctcagatgctgtaaaaactccttgaaaataaggtaataccttcaatctgctcagagctgcttctgcattcttccggtcaccggttgttgcgatcaccataggaatcttccgctctctgaattcctccagatactgacgaaccccttctttcaatggaactcgttttgcataatagtcttccacttccttattcagtccctgtacaacctcttccactgtcttctccaggttataatgtgagatcagataatctgccgcctcctccaggctcatctcaaataatgtctcccccaggttcttctcggcctcaattcccaaatgatccagatacaattctccaagattctcccagacaggcatggaattgagaaggacaccatctacgtcaaatattacaccttttatcatgtcattcctcttttctgctatgcactacattataatctccctggaaacgcatgtcaaccgttactgttcacacgatgtgtgaccagcaacgcatctcgccattttaaatcgcctttggcgatggggcgagatgcattcaagccaaaacacgcatcctccgtggcaatcagcggagtgattgacacgggagtgaacagtaactgtcaaccatcagaaaaagaccttctgccggcagatcaaccacttgcaaaaggtctttataaaatgctgttatttattttgtctcaaggatcttatcaacacttgccagttttacactcaatacaaatacttcagcggcaactgcaagttcttccggtgttggataagacggtgcgatacggatattgctgtcatgtggatcttttccataagggaatgttgctcccgctcctgtcataacaacgccagcttctttcgccttcgcaacaatcgctttcgcacatccatccagcgcatcaaaggagatgaaatatcctccgcgtggcgcgatccatgatccaatctcaagtccgccaagttctctttcaagaacttcaagaacagtctcaaacttcggacgcaggatatctgcatgtttcttcatatgttctacaattccgtgaatatctccgaagaaccttacatgacgcagctgatttaccttatcatgtccgatcgtctgcacacgcattgtgcttctgatatcctccaggttcgcatcagatgctgccattgctgcaattcctgatcccgggaaactgatcttggatgtagaagaaaacttgtaaaccatatccgggttacctgccttcttacactccatcagaatctcaatcagataatcctgcttatcttcatataaatgatgtacacagtaagcattatcccagaagatacggaaatcttctgctgccggcttcaggttcgcaaaacggaacactgtctcgtctgaatatgtgattccctgtgggttagagtacttcggtacacaccagattcctttgattgccggatcactgcttacaagtttctcaaccatatccatatccggtcctgttgatgtcatcggtacattgatcatctcaattccgaaatgctctgtaatcgcgaaatgtctgtcatatcctggaaccggacataagaattttaccttatcaagcttacaccatggagtacttcccatgataccatgtgtcattgcacgtgctaccgtatcatacatcacattcagacttgagtttccgaaaatgatcacgttatctttcggaacttccatcatatctgcaagaagctgttttgcttcatcaattccatcaagtccgccatagttacggcagtcaacaccatcttcacaagtcagatcaacaccacttgtcagtgtatccatcatccccattgacagattcagctggtctgctgacggttttcctctggacatatccagtttcagaccttttgccttcacttcttcaaactgcgcctccaggccactctttaattccaataactcttctttgctcaaatctttatatgcagtcattgcaggaatcctccactttctttattttttcacttttgttattgtatataatttttgacgtttcgtcaatgggttcttgcattcttttttatttttttgtttttttcagctttatttccacatgttttgcatttcaaaaatgtttttcattcattttttcactatattttgtgttatcactctatcccatcaggttttatctatgcattattgatttttcctcccctcctgtgatatccttagaaagtagattccagtcatcattccacttgactgtgaataaaaaccttataattctatggaggtactaaaatgaattttacatttgcacacaataacctgaatgtatatgatcttgaaaaatcactggatttttaccagaaagctctgaatttaaaagtagaacgtgaaaaacttgccgatgacgaaagttttaagcttgtatatctcacagacggtgtgaccccacatcttttagagctcacctggctgcgtgatatggatcgaccatatgaactgggagataatgagatccatcttgcatttgctgtcgatgatttcgatgctgcttacaaaaaacataaagagatgggatgtatctgcttcgaaaatccatctatgggaatttattttattgaagatcctgacggatactggctggaaattgtaccgggcaaataaaaaaagttttaaaaaaaggaatcagcatcactgattcctttttttgttctaatatcttacataatatgtaacacgtacagaacttaccttaaccggtactcctgtctgctgtgcttcgatcatctgtccgccgccaatgtaaatcgctacatgtcccggtgtccagcagatatctcccggctgaggattgcttacaattgttcctgctgcaagaatatctccacttgttcttggaattgaaattcctgcctgtctgtagcaatactgtacaagtcctgaacagtcaagtccaactcccggtgtagatccgccccatacatatggaactccgatctgtgaataggctgcatttacaataatgctccccttatctgcactatagcttggacttgatgaggaagaacttgagttgcttgagcttgaactgctggaagaactactgcttgagctactggagcttgagctgcttgaacttcctgagcttgagctgcttgagcttgaactactggaagaactattacttgagttatttctattagaagaactactgcttgagttattcttcttagctgcttcctcggcagctttctttgctgctgcttctgctgcctttctcttagcttcttcttccgctgctttctttacagcttcatcaatcttaacatcgagatttacgatttcactactcttctctgtgattgttgtattcagttcatccttctgcgcatcatattctgtctgtgtctcctgcagatcagccatctttgtctcaagcgttgtcttaagatcttctactttctgaactgtcgcaacatactcttcgagcttatctctgtcataagaatgtacctgctgggaatattctgcctgtgtcagtacactggaaatatctccggatgtcagtaccttctccactgtagcagtgcctgttccttcttcatacatgtacttaatacgaagcttcatggctgcatactgctgttcctgttcctcctgcgctgtcttcagatcttcctctgtctgagagatttcctcacctgtttcgatcagatcattctcaagatcagagatcttggtcataagtgaattcagctgtgtctgaagattacttacctgattctgtgtctcctgcttcttctgcttcagatcactgacctcgtcagcaagtaccggtgtaacagtcattgtacatgcaagtgttactgcaagaatcatactgcttactttttttaacttcatctttccacctatccttatttttatctagtcccccatgtgatgcattataatttttcgtatcacaattcattgtaaatagttacattataattccacatactcatatgttataatacaacatctattgtgttttttcaacatatttctcgtaacaagagggcattttatttacattctacgctcaatattatagcgtatttatgtaatattttcaatagttccccttacttttttcattttttcgtaacatttttgtaacaaaaaatctggaaagttctctttattcttagataaactttccagattcctgtttcactgtatgatcttttattttctactgaatatataagtttgtatatcccatcaggctttcatctacttctcttgccacttcacgaccttcacggatagcccatacaacaagagactgtcctctgtgcatatccccggctgtaaatacatccttcacatttgtagaatattttcctgcctctgtctttacatttgtgcgttcattcacttctacaccaaatgcttttgttacataatcctggcttccaaggaatcctgctgcgatcagaacaagatctgcatttactgtatactcgcttccttctaccggaaccatcattttccgtccggtcttctcatcggtcttactctcaagtttgataaggactgccttacagagattccctttcttgtcttttacgaattctttcactgtcgttgtgtaaacacgaggatcagaaccaaacacagcgatcgcttcctgctgaccataatctgtcttgcagactcttggccactccggccatgggttcatcggtgtcctctcgtccggtgctttcggcatcatctccagctggagaacgctctttgctccatgacggatagatgttccgacacagtcatttcctgtatctccgcctccgattacaattacattttttccttttgcagaaatgtagcttcctgttttaagcttcatgtcatttgcccatagtgctttcgttgttgatttcaggaaatctactgcaaaataaattccctgtgcatctcttcccggtactttgatatctcttggatttgatgctccacatgcaaggatcacgcggtcatattctttcaggatatctgccgccttcacgtcttttccaacattacatccagtctggaagataattccctcttcttccataatcgcaatcttacggtcgataatctgtttctccagcttcatattcggaattccgtagcggagcaatccacccggtttgtcctcacgttcaaaaacagttacctgatgacctcttctgttcagaagatctgctgccgcaagtccggacggaccggaaccgatcactgcgactttctttcctgtacgcactttcggtggatttgcctttgcatatcccatctcatatgcattttcaataattgcatattcattactttttgatgcaactgcttcctgattcagtccacaggtacatgcattttcacacagtgccggacatacacgggaagtaaattccggaaaattgtttgtctttttcagacgtaaataagcttccttccaatttccattgtagatcaagtcattccactctggcacaaggttgtgcaatggacatccactggccattcctgcaagcggctttccagactgacagaacggaactccacacgccatacagcgtgcgccctgaagctcctgttcttctttgctaagaggcgtatggaactcattgaaatgtttgatgcgttccaatgggctctctgccggtttatcctgtctttcataatccataaatcctgtcggttttcccatctctatgcctcctatcttccgttcttgatcatattaaatgcttcgatttttgctttttctctactaagtcctttttcttccatctggatgatcgtggacatcattctctcatagtcttccggaatgatcttcttgaattttggcagatattctttgaaattatcaagaatcttcttacctacctcagagtttgtataagcaacatgctcctggatcattccttttaattcctgtacatcatacttatctgtgacacgttcaatgttgaccattgctttatttactttacgatacaggctgttatcgagatcgatcacataggcaataccgccgctcattccggctgcaaagttctttccaacctgtccaagtacaacaacacatccacctgtcatatattcacatccgtgatctccgacaccttctacaactgcacgtgccccagagtttcttaccgcaaaacgttctccggcaacacctcctacaaatactttaccacttgtagctccgtaaagagcaacatttccgatgataatattctcatctgatttgaatttcacacctttcggctggcaaacaaccagttttccaccggaaagtccttttccaaaatagtcattactgtctcctgtcagttccagtgtcagtcctcttgggataaatgctccaaaactctgaccgccggcacctttacactggatcacatagctgtcttcttccagtccttccggatatcttcttgtaatctcagatccgaaaattgttccgaaagtacggtttgtatttgtaacatctacttcaagtcctctcttttctcctctttcaagggctgggagaagctgtttcaatagtactttttcatccaacgtcttgttaagttcaaaatcatagactttctttggattaaagataacacctttcttctctttcgcatatggattgtacagaatctgtgacagatccagtgttgcggcacgctctgatgtcggaacgtcttttactttcagaagatctgtacgtcctaccagttcatccactgtgcggacaccaagttttgccatatattctcttaattcttctgcaataaaacgcataaagttaacaacatattccggttttccgctgaaacgttttctaagctccggattctgagttgcaacaccaacaggacaagtatccaggttgcagacgcgcatcataacacatcccattgttacaagcggagctgttgcaaatccaaactcttctgctccaaggattgctgcaatcgcaacatcacggccactcatgagcttaccatctgtctcaatacggacacgctcacgcagaccattctgaatcaatgtctgatgagtttctgcaagtccaagctcccacggaagtcctgcattctgaatcgagcttctcggtgctgctcctgttcctccgtcatatcctgagatcaagataactccggctccggcttttgcaacacctgcagcaactgttccaacacctgcttctgataccagtttcacagaaattcttgcatttttatttgcatttttacagtcatagatcaactgtgcaagatcctcgattgaataaatatcatgatgcggcggtggtgagatcagacttacacctggtgttgagtgacgtgtcttcgcgatccatggatatacctttccacccggaagatgtcctccttctcctggttttgctccctgcgccatcttgatctggatttcctgtgcactgactagatatctggatgtaactccgaatcggccggaagcaacctgcttgattgcagaacatctgtttgtatcaagacgctcaatatcctctccaccttcaccggagtttgatttaccatgaagcatattcatggcgatcgccattgtctcatgtgcttcttttgaaatagatccataggacatcgcacctgtcttaaatcttgttacgattgaatctacgctttctacttcatcaagcggtacactcttcttcgggaaattgaaatcaagctgacctctcagattgatcttcttgccttcctcatcaaccatctctgtatactgcttgaacatttcataatcaccacgtcttgtggactgctgaagcatatggattgtctgtggattatagagatgttcttctccgccacttttatatttatgttttccaacactgtccagtgtcgtatcaacctgcagtccaagcggatcaaatgcttctgtatggaatgctgtgtaatcttctgcaatttcttcaataccgataccaccaacacggctgactgtatctgtaaaatagcggttaataaaatctgtcttgagaccaattgcctcgaagatctttgctccctgataggactggatcgttgaaattcccatcttggatgcaatcttaataattccatgaattactgctgagttataatcatctactgctgcataataatctttgtgaagcagattagactcaatcagctgacggatcgactcatgcgcaagatatggattaatcgcacatgctccatatccaagcagtgttgcaaaatgatgaacctctctaggctctccactttccagaatcatcgcgactgaggttctcttctttgtacgtaccagatgctgctgcagtccggatactgccagaagtgacgggattgcaacgtgatattcgtctacctcacggtctgtcagaatcaaaatattagcaccctcacggatcacacggtcaacttcaataaacagatactcgattgccttctcaagacttgtgtttttataataagtgatcggaatctctgcaactttgaatccatccactttcatatttttaattttcagaagatctgtattggtcaggatcgggttattgactctgagcatcttacagttctcttccttctgctccagaaggttaccgtctgttccgacataaattgttgtagatgttacaacttcctcacggattgcatcgatcggtgggtttgttacctgtgcaaacaactgtttaaaatatccgaacagtggctgacgtttctgcgaaaggactgaaatcggtgcatccattcccatcgctgcagttccttcggcaccgttctttgccattgtcagaatagaagttttcacgtcttcataagaatagccaaatgctttctgaagctgtgtacactcttcggcagtatactttggcacatccttattcgggattttcaaatccttcagctgaatcaaattactgtccagccattctccatatgggaactgatttgcatatttttcttttaattcctcatcatcgatcacgcgtcctgcaacagtatcaacaagaagcattttgcctggatgaagtctttctttcatcacgatcttggatggatcaatatccagaactccaacctctgaagaaagaatcagattgtcatcatctgtaatgtaatatctggaagggcgaagtccgttacggtcaagtacggctcccataacatctccatctgagaacaagattgacgccggtccatcccatggctccatcattgttgcataatactgatagaaatctttcttgttctgggacatctctttattgttgatccatggttccggaatacagatcataactgcaagcggaagatccattccactcatcaccatgaattctaatgcgttgtcaagcattgcggagtcagaacctgaagtattgattgctggaagtactttgtgaagttcgcctttcagacatcctgcctccatcgtttcctcacgggcacgcatcttatctgcattaccacggatcgtattgatctctccgttgtggaccataaagcggttcggatgcgctctctgccagctcggtgctgtgttcgtactgaatcttgaatgtaccattgcaattgcagaaataaattcttcatcctgcagatcttcaaagaaaagtctcagctgtcctacaaggaacattcctttgtaaacgattgttctgctggaaagtgaaacaacataagtatcatcactgctctgttcgaagattcttctgactacatacagtcgacggtcaaagtagattcctttctcgtattttgcaggacgttcaataaatgcctgcataatacatggcatgcaatctactgctgtctttccaagaatgtccggatgaatcggaacttctctccagcccaagaacttcaatccttctttttttacaataacctcgaaaatctttttcgcctgattgcgttttaattcatcctgcggaagaaagaacatacctacaccgtaatctctttcatctttcagcttgatcccaagtggctgacagacttttttgaaaaatccatgaggaatctgtgtcagaatacccacgccatctcctgtctttccttctgcatcttttccggctctgtgctcaagttgttctacaatactcaaggctcctgccactgtactatgtgtctttttgcctttgatattgacaattgcaccaataccacagttatcatgttcaaaactttcgcggtaaagaccacgattctgactttccatttctttcctcatagtcgctatcctttcttcctgtaatctaaagtttactttaaaatcttctttgtccggcgcattcaatcatttctttctcacgtcgtgtaaaactttttctagaatatacacccttttacctaggctgtaaatagggaaactcttgtaaattgtctgattatttgattttttattatttttcttttaatagtcagattattttgattttcttataaaaataatattaattattaagatttctgtttttctttgattttatttaataaaatactggattaaaaagaaaatgcgcgacaaggtttcgcacctcatcgcgcacaatttaagattgtatttttattagtacaatttatttcattcgtattttttcactattcttctgttttctgagtactcaccggatccccgcttctctgaatccacacaaaacaagctgcacagataaatgtgctgatgatcactgccactgccattttaaacggttctctggcaagccagttaaatactccgatatctgtaaagatcaaagagcccagattcaaaacaacgtgaagcataatcggagctttcattgaaccaaatttctcataaatatagcacagaagaattcctaggaggaaagtgtaaatcatctgtaccgtgttggtatgtgtgactgagaaaaacagtgctgaccagattgccgcataataaaatcctctggtctcccggtacctctgatagagcactccgcggaacataaattcctctgcaatcggaattacaaatccaaatacaataatctggaccacaaaatctgctgaatacatattctgtgcggtctggatatactccggatcaaccaaaacggcctgtgccatagcggacagacatgtaacaccaatacttccgatcactcccatcacaaaaagtgaccagtaattcttcagtggcttttgaacccccatccgctgtatccctgcaatctgctctttctttcgatcgataacaaacaatgtaactgtcagaaacaacgttgctgctgtagcaatccctgcaatcgcaatctgacctcctatgattttatcaaacgcaggacttaacacttcatagtacttattcatcatttcctgataattaagaacttctccactttgtgtcatcctggaagatgcttcccccataaaaggaagaatgattataaactcaatcacaaattccatcaccagctggattccccagaatccaagtaaaggaccggcagctctccagaaggagcgtctcggatcatttttcataagacaattcctccgctatcttctgaatccactctctgatctttccggcttcaccttttacagttccctgaaccatctccggctttccgcctccccgtccttcgaatgcagcatttaacattttggaaaatgcacgaagatcctgggttctgcttccgatcacataacggtatcccgctgcatcatttccataaaacacagcacaaagaattctttctttttcaagcacttcattcacatactgacgcatggcatccgcactgatatcctccgaaaacatacagaccgttttttcttcttccgaaacagactgcgcccagacgtgtacaagctggcgttctttctccaccagtgtccgtttcaaagaatccagctcttctttcaagtgtcccactgcctctgctgtatcatattctttcgcacagagcaacgctgaaattttcctgttctgttcctgcttcttctcataatctgtaagtgcacggcttccacagagcattgtcacacgaacgccgcctttgtatcgctgcatattaacaagcttgatcataccgatctctcctgtgcgttcaacatgcggcgcacagcacgcacagatatcatatcccggaaccgatacgatacgaacctgtccctcaatctcaatcttactgcggtaatccagttcttccagctcttctttggatggataggacacttctattgtcagattcttccacactgcacgatttgcttcaagttcaatctcctgcagtgcttcttttgatatctctccatcaaaatccatcgtacaatcttctgttccaagatgaaatccgacattgttgaaaccgtatcttgcatgcacgattccggaaacaatatgctctccggtgtgctgctgcatcttcataaatctggtctcccagtcgatctcgccttcaacaatctctcctgcttcaaacggctgatctgtaatatgcagaattcttccattcttttcccgaacatcagataccttcgcatccttcagttttcctgtatctgcatactgtccgccgccttccggaaagaatgctgtacggtcaagttctaccgcatagcatccttcctttttctcatacggctcacattccagaacctttgcagtaaattttgaaagatggctgtcattgtaaaacagtttttctgttcttgtaccatccatcaatccattttctgtcataattcgtattacatcctttccggagctgtaaatccaagaaggtcaatgcaggtctcaagtacttttttcgcaagtgtaagaagtgcaagataacctttcttcttctcttcgtcttcttctgcaagaatctttgtctcatgatagaacttattaaagtcgttcgcaagatcatagatatatgcacacaacttatgaggagctgtctctttatatacattatcgatcacttcattgaatttcactacctgaagcatcagagacttctctgcatcattctcagccggtctgatcgttccgtcaaaaactccgccattctcagcatatttcttgagaatagacttaattctaacgattgtataaagaatatacggtcctgtatttccctcaaaggaagtaaatctgtcaacatcaaagatataatccttagaagcctggttagaaagatctccgtacttgattgctgcaagtccaacttcttctgctgtacgtcttgcatcttcttcctctactgtacggttgtccatgatcttcttatacatctcatcatcaatctcacggatcagattctcaagacgcataacaccgccttctcttgtcttaaacggcttaccgtcttttccgttcattgtaccaaatccaaggaatgtaagttctgtctccggttttacaattcctgtcttcttcgcacaacggaatacctgcacaaaatgcagttcctgacgcttatcaacaacatagatcacctgatctggatcatacagtttctcacgttctaccagtgtagcaagatctgttgtatcatacagcgcagctccgtcagatttcagaatcatacacggaggaatctctttcttatctgtctcttctgcaacgtctactacaagcgcaccctcatcataatgtgcgaatcctttctccttgagcatctcaaccatatccggaatatatgcctgggcatctgcttcacctttccaaagatcaaaatctacactcagtcgctcgtagttcttcttcaagtcagttacagacacattcatgatatgtttccagattgcacgatatcctttatatccattctgtaacagataagttgcatgaagtgcttcttctctataatcgtcgtgctcttttgcataagcacttgctgtaggataaatctcttccagttcactgatcgtaaatggtgcttcttccggatattctccttcaaaactctcatcaaaatacgggagttccggtttacgttttttcagctctgtgatgatcaggcccatctgatatccccagtctcccagatggatatctcctgttacatcatttcctttaaaacggataatacgtttaatgctctctccgataatcgcagaacgaagatgtccgacatgcaacggttttgccacgttcggtccgccgtaatcaataataacttttttcggattcttttctttttcaacaccaagattctcatctgctgccatctcattcaaatactctgcaacaacttccggtgccagcttcaggttgataaatcccggattcaccgcttctgctgatgcaaaatacttgctatctgcaagttcttccacaactgcattcgcaatcatgattggagccttcttatatttcttcgcacctgccattgcaccattacactgatattcacagagatccgggcggttggaaagcgtaactcttgcaagctcttcatcatatcctgctgctttgaacgcttctttcatttctattgtgatcatttccagtaatgtcttcaaagtttcacactcctctttacttttcgtttgtcttttctgcctcccaacttttctggagacaaacagccactatttattctatcatgtatccaacagaacagcaagcgttactgtaaacggagattaacatactgtaaacagagattaacagagattaagtgcaaagataatgaaaccagtcgcaaaactgattgacataaaaatatcgaatacttataatgtaaccaaaactttacacatactgttacctgtatgatgtaacatcagacagaaaggatacccaacaatgttaaaattaggttcacacgttggcatgagtggaaaagaaatgcttcttggttctgcgaaagaagccgtttcttacggtgccaatacatttatgttttataccggagccccacagaatacccgccgaaaagaaatcagtgaattgaatatcgaaccagcatgggaatatatgaaagaacacggaattgatgaaattgtcgttcatgcaccttatatcatcaacctcggtaattcagtaaaaccagaaacgttctctcttgccgtagaatttctggcaaaagaaatcgaccgcacgattgcctgcagaagccatactctgatccttcatccgggtgctcatgtaggtgccggtgtcgaaatcggaactgcacagatcatcaaaggactcaatgaagttctcactgctgagactgactgctgtattgcccttgaaacaatggccggaaagggatcagaaatcggacggaattttgaagaacttgcccggatttatgatggagttgtccagaatgataaattgagagtctgctttgacacttgtcatacaagcgacagcggatatgatatcatccatcattttgatgatgttatggagtcttttgaccgtctgcttggaaaagatcagattgccgtcttccatatcaatgacagcaaaaatattccaggagccgcgaaagaccggcatgaaaatatcggctttggagaaatcggttttgatgcaatttctacaattgtccatcacccggatttcgaatctgtaccgaagatccttgagactccttatattccttctgtaacaaaagcaaagaaatcttatgccccttataagtatgagattgaaatgctaagaaacaaccggtttgatcctgaaatgaaagaccacatccttgcagattgtgaataaaaaactatatgaaaaaatcctgttattctcagccatctgaatgcgctgaaataacaggacttttttatcctatagcgtctgagcggagtcgaaccgccgcacatgcctccggagggcatcgctctatccactgagctacagacgcatctcggttgttagtaggaaaatttaatttcgtacagctaacaaccttttttatcctagcacaattctgtataaatgtaaagtggcaaataaacctctaactttctgcggttaatcttttttcactgcaagcagaagaattaatatccctgccccaagacaaagcattgcccatgcacctgcctgttgtgaatctccggtctttgcagcctcttcccttatcgtttgttttggacataccctgacattccagttcattgcccctttgtcctcttcccattttggcagctggacaagaaccggctgaacctcgtattctgattcatcttcaacatagatcagataaactcctgccctcagattcgtaagggttgcttttccatcacaatccgtcctgcacaatccatcactataatgatatttactcaaagtccgcgccagctcttcctgttctctggcataccttacctcattgagatccacgcctttatcttcatatcttttctccatctcgtaagcaccatcaacaagagatgccactttggaatactggaatgtaacaccttctctcttaatttgttctccggtatcttcaatacagatttctatatttcctgtttctgtttctgcaaacgccgggttctttactgctaccaccagaaaacatatcaaaagaagaagaattccgcatttgattttcccattttgccgtcttttgcatctttcttttttgtcttctgcttttctttctttttcgtttctttctcctgtagtgcttacatttccttttctggtttctgtttctttttctctttccctcacaatttcttttttctcgctttctttttattctttcaatcacaacatataccaaaaagagaattggaatcattgtgaagatcatttctctgacagacggacgtttctttttgatttcctcttcttttttctcttcatacacaacccgctttccagtaatcactaaccgatgggtattaattccatatggggtacatgtgacaagcgaaaccagatcttctcccggtctgatttccagactttctacctcttctggtaagattacatttatttcttctactttatatgcgagtttttctcccagtacttccagaaagaactcatcgccttcctttaattcatccagacgagtgaaaagtctcgcacttgcaagaccacggtgtcccgtcatcacacaatgcgtattttctccccctatcggaagactactgtccatcaaatgccctacaccttccttaagtactgcctcgctggttccatgataaaccggaagcctgagatctattgacggaatttccagtacacacatcattcctgtctgtattttttcggcatttaacagaccttcatactcttccatctgctcagactcgctttgttccctgactcctttcgattctgcccaaagctttttattatattcatcagcctgattccttaattgttcaatttcatctcctgttgtctgttccacaacctgttcatatgttgccaacacattttgtgttttcttctgactataccagccagtcaaaagaggtatactacacaaaataactcctatccatagtaaaagatctgactgtaatctattgtttttcctttgcattttttctgtttcttctcattgctcctgcaagaacaagaacacttccggttgtaatacagataacagctgctgaagaacctgttaccggcagtttttttccaactgtattaattactgtcagattagcagatccttcgccttcatttgttgtcagactgacttctgattctttccagtttccgttaataaattctttgatctgcgcagatgtctccagttttttcaatcctttgtctgtttttccgtctccttttacatatgcgtttctatcatttggaaaacttgcttttatatttaccacaatcggctctgtcagcagacggtatcctgccggtgcctctgtttctttcagataataggtgccactatctaatccatagatcacaaatgttccatcctgaccggatttcatctccaccgcattttccggctgctttccacctgtatggtcgtttcctccaagactgtcccggttaattacaatgtacccaccttctccctgttttacatatacttcattttttaatccagcgtcagaataaagtctgaacctggcattttccagactttgtccatggttatttgatttcaatgcattgattttataagtgaaacaaacaactgtatcccacggtgtatatcctgtacttcctctcaccgctgaatccggatcatttgaaaattccagccgaacatcgttttcaaatcctggacgtcctgtatttttcgctgccttttcattcaatgttgcctgataggtaagcactattttctgtccatatttattttctcctgcttcatttttacgattaaactctctgtctatgatttttttcatatcagaaacaatgacctgaaacgtatctcctcctcccggagcttcctttacttcaaattcaccctctttcaattcataataatttcttgcatttgaactttcataaatccggatggctacagaatcctttttgaaagtaagtgcttcactcatcacatcatgccatgcgtaataataggtgttgtatccgttaacatcaggcatatttgactcataccgatacggaacagtctgcccgatttcaaaatcagccaaatcattccatccctgatttccaactttgtcctgatcatcatcttcccggatcttttttgtcacaaccggatagtctgattttatgttgagattcatttccggattagctgtacttaccatacacaaagagaccgccgaattcgttccttttacctctgtcacttcatcaataatataatatccatacggcaatcccttaatttcaaatgaattgtctgcttttgtacttgtcacttcaacagattgacctgtttttccatttctctgtagatgggttcttaattcttctacaaaaacacgatattcactgtatgctccttccttttcctgagcggtctgcgcaccttctgtctgatgcgtattcaaagactgaatatagtcgatcacctcatactctgttacatttctctcatccttatgaatccgctgtcccacgatataacaaacaaatttcttgtattccggattaaatgtgtaattaatggattccattcctttcgcattttctgcctgaaacaactgatataccaggaatctttttcctttcaggctctgtccgtcatttcctttgattgtaatacttgccggtccattattaagatttaaaaccccatttgtagttgctgctctttcctgtacttcattttccgctgcatatacagatttgattccagtcacacctgttgttccagaagtacagagtaccgcagctaaagtcatcatataacaaattttcatcattctttttttcattttctcatctcctcatttttcactgttttactactatcttttttgctctttttttctgtaaatcattgtcatgatccctactgctaaaattcctgtaagtaacacaggttttcctgccgatccagtatctggaagcttctttcctgtctgatttataattttcattttcacattccactccttaattgaaccttcaatacttatcttgctgtctgcagtatctttgcttctgtattctttttcatttacaaccaacagacactttccctcttccggattactttccagacagatttcatatacaatatctgcatcatctgatgttttcggaattctgtaacctatcggcgcttttgtttctttcatatagtattttttctttacttccagattttcgaacattgcaattccatttccatccgtcaacacccggtcaatttctttctggcatgcctggtcttcatataaagtaaactcagctcctgcaagtgcaacacctttttcattttcctttttcagctcaatcttgtaacaggccggcttatcttctatcgtcactaccgcaattccatcctctgtatattcgataataacctctccttcttctgtatttacctcagataaaaattctgttttcccgctctcatcaacttgaaaaatcagttcattattatttgtccgatacccgtccggtgcttttacttcttttaatttgtgcgttccctgagataatggcattactttcagattccctttttcatccgttgtgagaatcttttcacttccatccggtctgatatgcttaaattgcgctcccgaaagaagatgtcctgtctctgttgcttttttcaccaaatggatctggaaaaccctgtccggtatcgtagggttctgatatacatttattttttctcccgtaccttctggttttatctggcaaacaaagacttcctcattcaggaaatacccttttggcggttttatctcctgaattgttacagttcccagcggaagcgcttctgttccgtctgtcgctttatacaatgcatcaccttttaccttatacttctcctgataacggcaaactgcttttgcatctgtttgaaagacccagcttctgactggcttttccccttccttttccggatttttccctggatccagaagttctgcatagaatttcactaaaaactgtgctccctgatacgctgctgtccctgacggatcaacatactcctgttccatgcctgttttctttagcaaaagttccacaggattcatctgcggtgggtctgaaaatgtcaccagagactcctgcccggatgttactgtaaccgtttttacttcatccacaagtgcataacctttaggagcttttagttcctttacgtaataagttcctgcattcagcgcaactgatgacgaatttcctgccgcatctgttctaaacgttcctgctcttgatgcacccgaaagagtaggactgctataaatgccatactctgctccctccaaagaatagcaactgttcttttctgtcacagaagtattcgctgacaccttctttaatctccctgttccggtcggctggtatgttccgccccatttactgagcggctggccatttccttcataaataaccccatatgcatccgggaaatatttataattctctttcgcccatgcaatccctttttgataatactcagatttgtgtgctgaaatccaatgaccattcccacaggctacattatttcctgtttctatctgaaccatatctccataccagtgatgtacttcattcatgatccaccatactgcgcattgttttaagagataatcgtaattcgaactcacaccgttgcatttattcttatcgtagtaatagaacattgccgcgatcatctgaatggtctgtttgttataacgttttgaagcatctactgctgttttgttgccctcctgaaattttaatgttggattggtgcaatacagactttctcctgatttcgtaccaagtcttccttcattccaatgttgtagcacaggccagtttgggtcgttatagtcaactacatcgattgcaccgattcccctttcgatcgcctttgtataaacagtttctcctaccctttccgctgcatatacgcctatgctttgtatcttcttttcatctgtctgatcaaaagtttcttccttgtcttcctcctgtttatcctccgtttcatcacaaaatcccacaccgatatctttcagaattttttttacttcttctgcccagcgcagttcttcttcaatatcaacctccgttttttctccggcctcttcaggctgtttttcaagttcttcggccttgacaatgcctccatatgtcattgcatagagaatacagatcaaaaagactgacatgcagaggattgttataatctctccgcgtcctttcattcattgtcctccctgtcgatacacatctctttccccagctgaagtttcccttcctgtgcataataaaaataagcatgattgcttaagatttcttcctcaggcacctgcgtttcattgatttctcgcaccattctttctaattctgactgacggattcgagaggattccggtacaatgatcacttcatggacactgcttggaagaacatagaaattttcctttaagactcctgcaagcatgtccagaatataagggtatgcaatacaggccgccccataatttttcagtttattagacaaaacatacattttatctttttccggaagttccagttcttcatgaatatgccaggttcttcttaacaaattctcccgatcatgttcccccggagttgatctgctgagcagttcatacactgcaaaattcattccgaaacattctgccggaagcagacgctttgtattttcttttgccacattccaaagctgttcttttgtcaccttccattgtctcatatgcagatctttgatcagcatcactgccgtcccatcattgtccgcttctacaagtactgcaaacacaagtgacagatccaaaaattctctatgtggaacatccagaagtaattccttgtttttctctgtgttgatcagtcgaaagatgattctgtcttttaccccttcgaaagaaagcattctctcataatcccatgatttttcctgtcggatttcttcatatagctccaccagatcttcaatgatccaatccatctgtttccctttttcatatagttcaaaaaattcttccagatagattgtcggcgatatattaacacccggcgtctccaggatcagtcctgtacgctccgttgcattattttttttcgtcgtatagacgtttaccctgacacctccatttaactcctgagtcagtttttcctttaccgcatttacaaattctgtataattcactcttctccttcctgattgcggttcataaaattaaaatgagaaaccagtacgaaatgtactctttcaattgagttagaatttcccggagagttcagaatctctccaaatagaatttcttaaaatttagaacaaatattatgtgttctttattatagacaggccttccttaaaaagcaaggcagaattttgcataaatccgaattgatttttttagtgaaaacagagaatttcatctgattttgtcaaagaaaaaaggaacctgcatgatacagattcctttttgaaatacagcttaaaccgtactaaattcgtaattaaactcttgacagatactcgcctgtacgtgtatcgatcttaagaacatcacctgtctcaacaaacagcggtaccataacagtagctcctgtctcaacgattgcaggctttgtagctccctgagctgtgtcacccttgaatcccggttctgtctctgtgattgccagttctacgaacagcggcggctcaactgagaatacgttacccttatgggaacagatcttaacgttctcattctcttttacaaatttcagagcgtctccaactacatcagcgttgagagcgatctgatcatatgtctctacatccatgaagttatacagatctccatcctgatacagatactgcatttcctttctctcgatgtgtgcattctcgaacttctctgtcggacggaatgtcttctctactacaccaccactgatgatgtttttcagttttgttcttacgaacgctgcacctttaccaggtttaacgtgctggaattccaaaatctggaaaatatttccctcaatctcaattgttaaaccattcttaaaatctcctgctgaaaccatgtataatcctccttaattgcatttcgttcagacaatgtaactgttcgttacagactttttgcttctaccattctatactaatttgcgacttttttcaatctttttttgctcttcttatagaaatgaagcacaatcttctccaaataccgctttaaaacgatctgaatctcttcttttggattgatcggatgcactaaaatgttgtgtattccgaccctctttgcgccccatacatctgtaaaaagctgatcgccgacaaacagcgtgttcgcctgatctgttcccatgatctccatcgcatgaagataattctttcttgcaggcttcagcgcattataaatataatgcgtctggatctcctgattaaacatctctacacgttttttctgattgttggacaacagacagctttcaaagccaatctctctcagtctttgaaacagtctctttgcacgttcatctgccggtgcaccgtgaggaaccaatgtattatcaatatcaaagattaccccccggtatccttgctcatatagtttttcaaaagggatcttataagtcgaccccaaatattcatctggaaaaaatttttcaaacattattttcatctaactccgtaagctttgaaatcaattcttctataatcccaagaattgatttcattataacaattcagtgaaatgatgtctactgtttttccaacgcatcctgcacatttctcctgaattctacccatgcgtcctcatcctccacaaaatatttcggacagatttttccggttacatcatagtgacggatcacctgatctgctgtcagatcatattttgcacaaagccatgctgtaagttgtacaagtgagcggtatgttgcatcagtaaactttccattctcatccggatgacaacattcaatcgaaatcgtatccgcattgcggtcatttgaagcatatgccatctcccaggtcggaatgcactgaataatctctccttccaatcctatcacaaaattactgcttgccgaagtctcatggctatctttgagaccattaaaataatctctgttatcctgcgctgtactccctggattcgctgtgtaatggacaacaatcccattcacatggtcaattgttgtccctggtctggaatacggatttacatctaacaactgtacatccatctccggctgcgtagcatctacatcagcatattgatttttcttttgtatacaggatttaaaaagaagaaaaagcagtaaaatcattaatgggatcattatgatccgcagcattttcctgcctcgctttttcttccttcgtgtattcttcggcaatgttttccgtcctgccagctgatttcgtcttgacgtactcattcggtatttctcctgatttttaattctctcatttccatcgtttaaaacaaacatcttcttatttcagctattataccatatgtttcttaaccatttatgaattttgtcttaactgttttatattcgtataaaagagaaattcccggtagatccagctctcactgaacctccgggaattcctcaaggcgttcctatatattattttattatatcagggatgtgatttttcatcccgtcaggtaatgcggaatatccgcagtacttccaaattatcagtctgcataaaatctgcaaacttcccaattactcgtctacactgtagttcggagcttcttttgtaatatgaatgtcatgtggatgactttctttcagtgatgccgcagagatcttcacaaatcttccgttctccttgagttcttcgattgtgtgtgttccgcaatatcccattcctgaacgaagtccacccatgagctggaataccgtatcttctacagatcccttgtaagctacacgtccttctactccttccggaacaagtttctttgcattctcctggaaataacggtctttacttccgttctccatcgctgcgatggatcccattccacgatatactttatattttcttccctggtacagttcgaatgttcccgggctttcatcacatcctgcaaagatgcttcccatcatacatacattcgcacctgctgcgattgcctttgtcatatctcctgagtacttgataccaccatctgcaatgatcggaataccatactctttagcaacttcgtaacaatccataacagctgaaacctgaggtacaccaatacctgcaacgatacgtgttgtacagatagatccaggtccaataccaactttaactgcatctacaccagcttcgatcagtgctcttgcagcctctcctgtagccacatttccagcgatcacctgaagatccgggaatgcatccttaaccatcttcactgtgcggataacattcgctgaatgaccatgtgctgagtccataacaacaacatctacatgagatttcacaagtgcttctacacgctccagacagtttgctgtgataccaacagctgctccacagagaagtcttccctgctcatcctttgctgacagtgggtacttgatctgtttctcaatatctttaatcgtgataagtcctttcagattaccttcatcatctacgatcggaagtttctcttttcttgctttggcaagaatcttttttgcatcctctaatgtgattccttcttttgctgtaacaagtccttctgaagtcatggattctttgatcttcttagagaaatctgtctcaaacttcaggtcacggtttgtgatgattccgacaagtttacgtccctctgtaatcggcacacctgaaatacggtattttgccatcaggtcatttgcatcttcaagtgtatgctccggtgaaagaaagaaaggatctgtaataacaccattctcagaacgtttcaccttatcaacttcctctgcctgtgcttcaatagacatattcttatggatgattccgattccaccctggcgagccatagcgattgccattctatgttctgtaacagtatccattcctgcactcatcatcggaatattcaatacgattttctttgtcagatgtgttgacagatctacctgattcggaattacttctgaataagccggtacaagaagaacatcatcaaatgtaataccttcccctataatcttacccattatactttacctctctttcttaagaacccatgaaactgctttgaaatggcagttaatgtatctaaaaatcttttgtaattattaactgatatactacagaaattcccgaaggatgtcaagagtattttccctgatgtgctcataatttgtattgatttattttaacctttattattaagttttacttataagtactcctttatttattatctatgcgacaaactgagccttttttagaacaaacaaaaggttctatctgacattacgaaaatgtgatagaaccctctgttcctgctgctacagatctctatgtaacagctcttttattctattcttatagaaattctgcaaatcttcctgatggatagattacatcattcccattccacctgctccgcctgctggcatagccggtgtatcctctttaattgtagatacaacagactctgttgtaagaagtgtagaagcaacacttgttgcgttctgaagagcacttcttgtaaccttcgccggatcaaggattcccttctcaaccatatctacatatgtctcattgtaagcatcaaatcctgttcctacttcagactctcttactttgtttacaataactgctccctcaagtcctgcattctttgcgatctgagccagaggagcttccagtgctttcaggataatcttggcacctgtcttctcatctccctcaagagtctctgcgaattcttttaccttcttagaaacatggatgtatgcggatccaccaccaccgatgattccttcttcaactgctgcttttgtagcattcagagcatcttccatacgaagtttagcttctttcatctctgtctctgtagctgcacctacacggataacagcaactccgcctgcaagttttgcaagtctctcctgaagtttctctctgtcgaaatcagatgttgtctcttcgattgctttcttgatctgtccaacacgatctgcgattgcgttcttgtctccacatccgtcaacgataactgtattctctttctgaaccttaacagattttgcacgtccaagctgatccattgtagtttctttaaggtcgaatccgagttcttcagaaatcacctgtccacctgtcagaattgcgatatcctgaagcatctcttttcttctgtcaccatatccaggtgcttttactgctacaacgttgaatgttccacgcagtttattcacgatcagagttgtgagtgcctcaccctcgatatcttcagcgataataagaagtcttgctccagactgaacaatctgctcaagaaccggaagaatctcctggatattggaaatcttcttatctgtgatcagaatatatggatcatccagaactgcttccatcttctccatatctgttgccatatatgcggaaatgtatccacggtcaaactgcataccttctacaaggtcaagctctgtctgcattgtcttagactcttcgattgtgataactccgtcgttggatactttttccattgcatctgcaaccatctgtccaacttcatcatctcctgaagaaactgcagcaactcttgcgatctgctcttttccgttgactttgctgctcatctcacggattgcttctactgctttatctgtagctttcttcattccttttctcagaacgatcgggtttgctcctgcctcaaggttcttcattccttcgtgaaccattgcctgtgcaagaactgtagctgttgttgtaccatctccggcaacatcatttgtcttagctgcaacttctctgatcagctgtgcacccatgttctcaaatccatcttccagttcaatctctttcgcgattgttacaccatcatttgtaataagcggagcaccgaatgatttatcaagtactacgtttcttccttttggtcctaatgttactttaactgtatcagctaactgattcacacctctttcaagtgctgctcttgcttctgatccgtatttgatttcctttgccattttaactgcatctcctttatatttgtctgggtattactctacaattgcaagaatatcattctgctttacaatgatgtatttctctccttcaagctctacatctgttccggcatatttggaataaattactttatctccaaccttaacctgcattacaacttcttttccatccacaactccgccaggtccgactgcgattacttctgcttcctgtggtttctcttttgcctgtcccggtaatacgattccggactttgttgtctcttctgcttctaactgttttaaaacgatcttgtcacctaatggtactaatttcattgtaattcctccttactttattagcactcatttctcttgagtgctaacccatgaatataaaatagcactccccatttcatttgtcaacacagtttacatattttttataaaagaaaagccatggggctttctctgcctcacagcttttctttcgtctctaaaacttctctatgatcttctttcgttcatctcatagaatccgttctcaattttaaacttcagtagattcctgtcttccgactggtatctctctttcacaacaccggagcaacacaacagctctgtccccgttgaaatataacatctgtattttgcatccagcagaatcgttgtcagaggatcttccatcacttcaagataaatgtaatcttcttctgtatcataatgatccaccttacagactcttgttgtatcatcaaaaatagcatctgctgaaatcactttttccatctgcagatcaaccggatttccctcgtacatcttgtcttctccttctgcttacatccgctctttctcaatcctctcgagctctgtaaatacataatcattcagaactttaatataagttcctttcattcctgaagaacgtgattcaattactcctgcactttcaaacttgcgaagtgcattcacgataaccgatcttgtaattcccacacgatccgctaccttgctggcaaccaggattccctctgtaccatcaagttctttaaagatatgaatgattgcttccagctctgagaaagaaagtgtgctgattgctgcctgaacgacatgttcttttcttgtctcttccgcactttcttcattcactgaacgaagcatctcaagtcctactacagcagtaccatattcactgagaataatatcatcaatagaatacgttgcatcctgtttgtagataaacaatgttccgagacgctccccggcaatatcgatcggtgtgatgattgcctgacatccttccacagcatctgaagaaaaaccaagtgtctccagattaacattctcttttgtagacagaacactcagcaatctttcattaagcatattatcaatatgagatcctacagattctgtgatcagttcactgatttctctcaccttattgcttttgctgactccaagaatctttcccttcttgctgactaccagcacatttgagtccaaaatctctgtcagtaccgcacagatatcattaaacacaactttgctggagttattattatgcagcaacttattaatctttctggtcttatccaataattgtacgctcattgtctcctccacatgatttgctcttattcactacttctagcaaacagtaactattattttccaagttgtatacacaaatcaaatttcaaattccttactagcttatattatcatacaattcagaaaatagcaacgttgtgtttttctgttttttgaaatatttaatcttctttcttaattgtttccacatatccgcacttttcatcagcacaaactaatttattgcctttttctaccatgtatccaccacattccggacatttcttactggatggcttctgccaggacataaattcacattccggattatcctcacatccataatactttcttcccttttttgttttgcggataacaacttcttttccacacacaggacacggaactccgatcttttccagatatggttttgtatttctgcattccgggaatcccgggcatgcaaggaatttaccatgcggaccgtatttgatcaccatgttacgaccgcactcttcacagattacatctgttacttcatcttcaatcttaacttcctcaagctctttttctgcaatttcaacagcttcctcaagatccggatagaaattacggattacttccttccacggaacctttccttcttcaaccatatcaagaagcccttccatattcgctgtaaaatgaacatctacaatacttgggaatgactgtttcataatattattaacaacttcaccaatctctgtcagataaagattcttgccttcttttgtaatatatcttcttccaaggatcagagaaatggttggagcataggtacttggacgtccgatcccaagctcttccattgtctttacaagactcgcctctgtataatgtgccggcggctgcgtaaaatgttgctttggatcaaattcttcttttgtaagaacagaatccatgctaagatgtccgaccagtacattgctctcttccttctcttcctctgcctctacatacacagagcgaaatccatcaaatgcaacccttgctgttgatacagtaaagcagtactcaccggctccgatcttgactgctgttgtctcatacttcgccggctgcatacggcttgctgtgaagcgtttccagatcagctgatacagacggaactgatctctgcttaatgaatccttgattgctgccggtgtgcgtgtaatatctgtcgggcggatcgcctcatgcgcatcctgaatcttcttatctgcagactttgtttttgttccttctgctacatatgcttccccgtaagtctcagcaatatagcttcttgctgctgcatcagcttcctctgaaatacgtgtagaatccgtacgaagataagtaatcacaccgactgttccattccctttaatgtccacaccttcatacagctgctgtgcaatacgcattgtcttctgtgtaccaaagttcaatgccttggcagcttcctgctgcagcgtacttgtcgtaaatgggagtggtgctttacgcgtcctctcactgttcttgatatctgtaatctggaactcttcgttctctaatttctttaagatctcgtccatctcttcttttgaatggatcgtcatctttttcttctctgttccgtagaacttcgctgtcagaggacgtttctcaccttttactttcagttgtgcatctaatgaccagtactcttccggaataaatgcatcaatctctgcttccctgtctgcaacaatacgaagtgcgactgactgtacacgtccggcactcaacccacgctttacctttgcccaaagcaatggactgatcttatatccaaccatacggtcaagctctcttcttgcctgctgtgcatccacaagatccatgtcaatatcacgtggtgctttcaaagatgctttcacagcattctttgtaatctcattaaatgtaatacggcgcattttcttctcgtccagcttcaaggcagcagcaagatgccaggaaatagcctctccttcacggtcagggtcggttgcaagataaactttgtctgatttcttcgcctcttttctgagcgttgcaagaatctctccttttccacgaatggtaatatattttggttcgtaatcattctccacgtcaattcctagctgacttttcggcagatccctgacgtgtccctgtgatgctgcaactgtataattgcttcctagaaactttttaatcgtcttcacctttgcaggagactccacgattacaagataatgtgccataaaaactatactcctattttattctgatataataattctttgttatttcacgaatgtatccctgcagttccagtgtaacaagaatgctcatcaattttctgatctccacccgagattcctgcgcaatctgatccacattcttgggatacaaaccgacacaactatacaccaaatcatctgtactttcaagcacttttttatttttctcgttttttatctccgtgtttctgcacaaaacatttgtttcaatcccccattcttccagcagatttttaggattcagaaggattccggcaccctgttggatcaggtgattacacccggcactcaaaggactgtccagcggtcctggaagggcataaacatcctttccctgctccagtgccatatctgctgtaatcaaagaaccacttctcacccttgcctccattaccagaactgcatctgacagtccgctgatgatccggttcctcattggaaaattcattgcaagcggaggggttcccggtggaaattccgaaaggattccgcctccgtgttctatgatatccatatataaaccgatatgatctcttggataacagacatccactccgctccctaaaacagcataagattttccgcctgcattcaacgctgctctttgtcctgttccatcgatccctttcgccatgccactgatgatatcaacacctgctgccgccagtacttccgcaaattctcttgtataatgttctccatatccactacacccccttgctccgacaattgctgccttcttcttggctcccggacatgttcctttcacaaaaagagcaaacgggggatctggtatctcagccagccccggaggatattcttttgaaaaaaatggaataaattcgattccatgttcctgcattttgtaaaactcttcttttaattgttctttcgttttctctttccgggctttttttaatccctctttttcttcctctgtaaggaattcaattcctgtaatttcagtttcttctatataatatatcttctttccacttcctacgagttctcggagcagatacttttttcttgcagatagttttcgaatcgtagaaaaccagtattcaaaaatcatctcttcacacatcatacatacctcccccaatatttcctgtccaatgtccggtaaccgatcgcctcctgtaaatgttccagttttatctcctcactgtaatctaaatccgcaatcgttctcgcaacctttaaaattcggtgataagatctcgccgtcagattcagtacatcataagcctgccccatcagtcgcatttcttctccgtttaatctgcaatacttactcaattctgcaccatgaagcattgcattacactggatcttcgtgttttggtagcgaatcttctgtctctttcttgcttcacatacccgcactttgatcaccgccgaagactccggacaggaaacagactctttcaccaaatcccgatattccactttagaagcttcaacactaaggtcaatccgatcgagaaacggttggctgatcttacttaaatatgcctgaatctgtgccggcgtacatgtacaggctgtcgatggaaattttccacatggacacgtattcatggcagatacaagcataaaatcagccggaaagatataatttccgctggttcttgtgatctgtacgctgcgttgttccagtggctgcctgagcacttcaagaacacttctcttaaattcaggaagttcatccaaaaataaaataccactatgcgccaggctgatctctcctggtcttggaacaatcccaccaccaatcagtgctgctctcgttgcagtatgatgtacctctcgaaaaggtcttctggaaatcagtggttcccttccatccagcattcccatgacactataaagctttgtaagctccatactttcttcataattcatcggcggcagaattcctgccatacattttgcggtcattgtcttcccgcttccgggtggtccgaccataagcagattatgccctcccgccacagcaatttccgctgcccgacgaacattctcctgaccatataagtctgcgaaatcaggtacttcttctcccacttttcctctatcttctattttatcagcctctttttcaccaagatatctctgttctccacctgttctgtctccatctttcaaataactgatacattccctgagacttccaactgcaatgatccgaaccccttctacaagttctgcttccttttcattttctctcggaacaatacagcttgtaactttttgtacctttgcctctgataccatagaaagaatcccgggaacttttctgacttgtccatccaatcccagttctccgatgatcatacagtctttcattcttctattctgttgtaaaacgccaagtgacgtcagaatcgacactgcgattggaagatcaaatgacgctcctcttttcctcatagttgccggcgaaagattgatcaccacacgtttcgccggaaattcaagacctgaattccggactgcagaccgtacgcgttctgctgcttctttcacctctgatgacagatatcccaccatgtgaaaaatcggaagtccattgctgacatccgcctccacatagaccatttctaccgcaagcccttccattgccgcggattttactgtactaaaactcatatgcgctccttccttttcccagtcacaagcgcacctgttcttcttacaccccattgtaagctgctgaaattctggctgaatcagccggatttgattttcggaactgacattccgagaatgtatagatatcataacttccgaatattgatttgtcaatcagtttccgagaacttgagcatatggaaaagcacaatttccacattttttcataaactatattaaatgcatccagaggtgctgtcttgaaagcatttcctaatcccctcacaccggcggaagagaaaaaatacattcagagatacaccgagggcgatctggaagccaagcacattttaattgaacgcaatctccgtctcgttgcccatgttatacggaaataccaaaataccagtgaagatccggaagatctgatttccatcggcacgattggcctgatcaaagctataattacgttcgatcctgaaaagggaaatcgtctggctgcctatgcctcccgttgtgtagaaaatgaagtcctgatgtatctgcgcgccagaaaaaaatgcagccatgaaatctctctttatgaaccgattggcacagatcgggaaggaaatgaagtcaacctctacgatatcatcgaatctacagaaacagatattccagagcggattcatctgaaggacaatattcaaaagctttatgaaaaactggaaaatgaactttctccaagagaaaaacttgtactgaaaatgcgatacggactgtatcagggagaagaatacacgcagcgggagattgccgcacaactgggcatctcccgctcctatgtatcccgtatcgaaaaaagtgctatcggaaaactccgacaatatttttgaaatttctaagactcttctatgaattaacttctttatcctcttcctgtcttctgagaagatcgtactgagctggtgtctcgctcagttctacatgaagaacctgctttgaatgcggtgcactttcctgttcctctccatcctcattcaggatccggagaacctttgcctcaacattacttccgtccggcttcatgatctcaattgtctcacctacagaaaacttattgcgctgttcaattcttgcaagcccattctcaacggccccgacaattccaagataagtatactctcggatatatgtgttattgtcataaatctgtgtctcatgatctggttttccaaagaaaaatccagtcgtaaactgacgataagtacagtttgaaatctgatccagataccaaggcatgttcttcttgtaaagctctggatctttctgataatcatcaattgctttacggtaagttctcgccactgttgcaacataaagtgctgttttcattcgtccttcgatcttaaaactgtcaattcctgcatcaatcaattccggaatatgctcgatcatacaaagatcttttgaattaaagatgtaagttccgcgttcattctcatagaccggcagatattctcccggtctcttttcctcgactactgcatacttccaacggcatgggtgtgtacatgcaccctggtttgcgtcccttcctgtaaaataattactcagaaggcagcgtccggaataagagatacacattgctccatggacaaatgtctcaatttcaagatcttccggaattctttctctgatctccttaatctctttcagagacaactctcttgctgaaaccacacgacttgcaccctggcgataccaaaagttataagttgcatagtttgtgttattcgcctgtgtactgatatgacgctcaatctcaggacatacctcttttgcaatctcaaacacccccggatctgcaatgatcagtgcatcaggtttaatctctctcaactcttcaaaatattctcttaccccttcaagatcatcgttgtgggcaagaatatttgctgtaacatacacttttacatcatgtgcatgtgcgaattctattccctctttcatttcttccatagagaaattttttgctttcgcacgcaacccaaatgcttctcctccgatatatactgcatcagcaccgaaaattacagctgtttttaacacttccaggctgctcgccgggatcaatagttcgatcggtctactcatttttctactccttgttttatgctcactgccacaccatctccaagcggaataatagatgtgaccagatcctctctgtgtttcaattcatacagatattcccgcattctcgcatgtattgtacgatttctgcgttctaccgcaaaacgggattctatgatatccccatcctgcatcacattgtctgacacaagacagcctccatccgaaagcagtcgcaacacattcggaagataatgaatatattgccctttcgcggcatccataaagataaaatcaaaagttccttccatttccgcaagtacttctgtcgcatctccttcaatcagagtaatcttatcttcctttcccgctctgcggaaattctccctcgcaatcgggattctcttctcataattctctattgttgttatatgtccaccttccggcaggtaatcactcatcaataacgcagagaaacctacggcagttccgacttccagaacgcgcataggttttttcatcaaaaggagaacctccaggaaactctgcatctctcgtcggatgatcggtacatccgccgccagagcttcctgttcaattgtctccagtatttcactgttctctgtatccatagaattgatgaatgtaataatacgttcatccactatcatatcttacacatccacatccatgatgatcgggatcaccattggtcttctctttgtcttcttccagatatagtcattcattgcatcacggatcacaagcttgatcttattccagtctgtatgtcttcctttcagacacttctcaagtgcttctgaaacagcctttcttgcatcatccatcagctcctctgactctctgacatagacaaatcctcttgatacgatatccggtcctgcaagcaggcggttcgttcttctctctaatgtaagaaccacaataatgataccatcttctgcaagatgctgtctgtctcgaagaacgatatttccaacatctccaacaccaagtccgtctaccaggattgctcctgtatgaaccttatctacaaccttagcgtaatcatcacacaattcaagtacttcaccggactgcataataaatacattttccttcggaattccaaggctcttcgcaacacctgcgtttgctttcagatggcggtattcaccatgcaccggaatcgcatatttcggttttacgagagaatagatcaacttcaattcttcctgacaggcatgtcctgatacatgggcatcctggaaaataacttctgctccctttgcagagagttcattgatcacacgtgaaaccgatttctcgtttccaggaatcgggttggagctgaaaatgatcgtatcattcggctgaattgtaaccttgcggtgtacgtcagctgccattcttgacagtgcagccatagattctccctggcttcctgttgtgatcagcaccatcttctccggtggataattcttcatctgatcaatctcaatcaatgtattatccggtacattcagatatcctaattctgatgctgtagaaatgatattcaccatactacgaccttctacaacaacctttctgccatacttataagcagagttgatgatctgctgtacacggtcaacattcgaagcaaatgtcgcaatgatcagtcttgtattctgatgctctgcaaaaatgtgatcaaatgtgatacctactgtacgttctgactgcgtaaatccttttcgctctgcattcgtactgtcagacatcagtgccagcacgcctttcttaccgatctcagcaaaacgctgcaggtcgatcgcatctccaaataccggagtataatcaaccttgaagtctcctgtgtggacaacaacacctgccggtgaatagattgccagtgcggacgcatcctggatactatggttcgtcttgataaattcaatccggaactttccaagattgattgactgaccgtgacgtacaacctttctcttcgttccacgaagcagattatgctccttcagcttgttctcaatgattcccattgtaagcttggttgtataaatcggaatgttgatctctttgagtacatacggcaatgcaccgatatggtcctcatgaccgtgcgtgataacaaatccctttaccttggaaatattatctttcaggtaggttacatccggaattacaaggtcgattccaagcatatcatcttccgggaacgcaagaccacagtctacaacaacaatactgtcttcatactcaaacgcagtaatgttcataccaatctgttccagacctccaagcggtatgatacgcaattttccattattctgttttttcaaaaaatatacacctccactatctctgtttcttcatacagtctttacacagtccgtagaatttcagttcgtggtccaggacatggaagccggttgccttctcgatatgatcttccagactctccagaaggtcatcatcaaacggcatcaccttgttacatctcttacaaatcaggtgatgatgattatgctttgtctccccgttcagtaaatgtccgatctcatagcgcacacatccatccccaaaattaatcctgtctaccagctgcatatcccacaaaagctgtaatgttctgtatactgtggcaagcccaatctccggataatcctctgataccagatcatagatatcttccgctgtcatatgactcccactgttctcttcaagtacggacagaacaagcagtctctggtgagtcaccttcagccccttttcctttaacttctctttcagaagcttctgtgtcttatctgcttccatctgtctgcctcctatctatattgtaaaaagaactccagacttttttctgacacttctgcaaaagtgagaaaagtattcctgtctgcagtttctcttacattcgtatttctttcatgtaattacatctcaatatcgacgtcttccagcaattcctcaaatactttggaaactgccatcagctctgtatcgtcttccacgatctcatacgtcttctctgcgtcttttgattcttcaacttctctgagaatcaggcattctgcgtcatcttcttctgaatcaactacaagaatatacgcggaaccattgatctttgtctcttcaagtacaaagaactcatctgctccacttccatcactgaaagtaaactttgccttttccatatgattttcctctattctgctgttttctgcatataaatcgaatctaaatatccctggagaatgaacacagcagcaatcttatcgacatattgctttctgttttctcttctcacaccactctcgatcagtgtctgctctgccgctactgtcgtaagtctctcgtcccacatgatcacttccagtcctgtacgacgaaccagcatgtcacgaaattccaatgacttctgtgcacgctccccgatatcattattcatatgttttggaaatccaagcacgatcttctctacctgatattctttgatcaattcttcaatcctcgcacaggtacggcgcagcttgttctcctctttccgttgtattgtctcaattccctgggccgtaagtccgagcgggtcgctgatagcaacacctacagtcttcgtcccatagtccagtcccattactctcattgtctgattattcccacgcattatgctcaatatacgctttcaacagttcttctaccagttcatcacgttccaccttcatgatcaggcttcttgctccgttaaaacttgtaatgtatgtcggatctcctgacatgatatatccaacgatctgattcaccggattgtatcctttttctttcagagccttgtatacgatctcaaaaatatccttcgcagaaatctgcggacccggctctacctgaaagaactgagtactacttaaatcactcatctttcttcctccttctctttcttgtatctatttccttcttccgaagggctttgctgttgttctgtcaaacagcgcaaaacgctctggaaacccagaaaccctacttataattctaatataaccgaattcaaaattcaatgtataatttgcgaatccttcccaatttgaacttttacgatactattcttgagattttcatttgtctctagtgcaattttcatatattctttcgtatgacctgtctgtacttcttttccattcagttccagatcctcttccacaagtacttccacttcttttccctggaaactctgttcatatgctgcacgctttttctcaccaagttcgattaattgtgcacttctcttcgccttgatctgttcatctacctgatctggcatcacagctgcttttgtcccctcacggcgggagtatttaaaaatatgtgtctcatagaaatctatgctgtctacaaaatcatatgactctttgaactcttcttctgtctctcctgggaatcccacaatcacatcggttgtcaatgccggattcgggaagtattttctgagaagttcacatttttccgcatattcactgcttgtatatctacggttcatacgctttaatgttgcatcacatccgctctgcagagacaggtggaaatgcggacacatcttcggaagctttgcaatcccttctgcaaattcttctgtgatgatccccggttccaaagagccaagacggattctttcaattccatcaatctcatggactgcccggatcaattccagaaggtgatattctttatcaaaatcaattccatatgagctcagatgaattcctgtcagtacaacctccttatatccgttatctgccagtgtacgtacttcatcaagcacatcttccatggaacggctgcggactcttccacgagcatatggaatgatacaatatgtgcagaactgattacatccatcctgaactttaatataagctcttgtatgatctcccggcttcgtcaggtgaagattctcgtactcttttgtctttccgatctcttccatcttgatctctgcttttctgtcgttttcctggttctttgcattcttttcattttctgttacgttgcaatctgcattgtgtgttctttcatactcttccaatgcttcgatcagattctgcttcttattattaccaagcacaatgtcaatgcaatcatccacctgaatctctttttccttcgcctggacataacatcctgcagcgacaacaactgcatccggattcatttttctcgcccggtgcagcatctgtctcgacttgcggtccgcgatatttgtaacagtacatgtattgattacataaaggtctgccccttccttgaaaggaacgatctcataccctgctttttcaagcatttcctgcatggcttccgtctcataggcatttactttgcatcccaaattgtgcagtgctgctttcttcatttatttctacctcttttttccttttatctcgttaatttcttgacttttgaacctgcatcccgtagaatatacctaggcttagaagccaactttattgtataattcaaggagggatttcaaatgaaaacagtacagatttcattaaactcaatcgacaaagtcaaatcattcgttaacactatcacaaaatatgataatgatttcgatttagtatccggaagatatgttatagatgccaaatcaatcatgggtattttcagccttgatctttccaaaccgatcgacctgaacatccacgccgacagcaatattgatgacattcttgctgcacttgatgcttacatcatcaaataattctatctgaatacaactcatgcggactttatttttgtagcttgtccgcatattttttagagtaaagaaaagctgttccattggagcagcttttctttttcctattattctccctgcttcacttcaatgatctcaacagtatcaattgctgtctgcatcagttcgtcaatcttttctgcaaggttcaactcagacttctcaattcgttcaatattcggctttgtcaccggatgttttgcaacgaaaattgtacaacaatcctcaaatggctggattgaagtttcataggtattgatcttctcagaaatttctacaatatccttcttatcaaatccgatcagcggacgataaaccggaagtgtacatactgcattcgtcgctgcaagactctgcattgtctggcttgctacctgaccgatactctctcctgtgatcagaccaagacatccgtctttctttgcaaaatgttctgcgatcttcatcatgtagcgacgcataatgatcgtcagttcatcatgtggacacttctcatagatataaagctgaatatctgtaaagttgacaacatgaagcttgatcggtcctgaataagcagaaacgagtcttgcaagatcaaccaccttctcttttgctctttcacttgtgtacggtggtgcatggaaataagttgcctcgagttcaacaccacgcttggataccatatatccggcaaccggactgtcaattcctcctgacagaagcagcattgcgcttccgtttgtcccgattggcatacctcccggtcccggaatgattctggaatagatataaacttcttcacggatctccacattgatacgaagttccggcttatgaacatctactttcatttccggaaatgcctccaggattgcttctccgacttcacagttgatctccatagagttcgcaggatagctcttctttgctcttcttgcatcaactttaaatgtcatgttcttctcttcgtaagcttcatctacataagctacaacatcttttctcagctgttccaactctgccaccggtacacggactaccggacagattccaacaataccgaataccttctgaaggctttctactgtctcatcaaaatcataatctccatcacaatccacgtagactcttccgtgacatttgtgtacaaggaattctccgtctacgccctgcagagcataacgaatctgacgtaccagtgcatcttcaaagatataacggttctttcccttaattccgatctcgccgtattttatcagaaatgaatgaaatttcatgctttttctcctttatgaatcgacgtcaattaatgacgcgtatattttctcagcatcggtatacaattatatagtgtttccagcgtgtagtcaatttcttcttttgtagtaaattctgacatactgaaacgaatcgtcgcatccagatattcctgtgccgccccaatgcttctgagaacaccgcttactgccggatgattcgatgcacatgcagatcctgatgagacataaatccccttatcttccagtgtatgaagaagaacctcacttcggattcctgcaattccaagactgatgatatgtggtgcacttccttcatctttcagaccatggactgttgtattctcaatctttcctgcctgctcaataaaataatccttcagttcacgcatcagagctactttcatatccagatcattatagatcatctttgttgcaagtccaagccctgcaattcccggaacattttctgtacccgaacggagatccttctgttgtcctcctccgaaaagaatcggtttaatcttcaccttttcacccacataaaggaatccggttcccttcggtccatgaatcttatgtccactcgcacttaacaggtcgatcttctgacgttttggataaatgtgatattttccaaatccctgcactgcatccgaatggaaaagaatagaagaattatactcttttacaatctttaccgcttcatcaatcggttgaagtgttccaacctcattgttcacatacataactgatacgagaatcgtctccggacaaagtgcttctttcaatgcttccagattcactcttccactcgcatctaccggaagatatgtcacacggaacccttcctcttcttccagataacgcattgtatttaagattgcaggatgctcgattgaagttgtgatcaggtgatttcccgctcttctgtttgctcttgcacatccgatcagtgcaagattatcactctctgttcctcctgatgtaaagtaaatatctttcgcatttaccttaagaacctttgcgatcgtttccttggcttcctttacataatgctccgcatctacaccttttcggtgcatggaggatggattgccataatcctgacacattactttatatacaagatctcccacttccggatatgctctggttgtggctgaattatccaaatatgcttccattttatcttcccttttctaactctgttaccattcacaggcgtctgcaaccggcaacgtctttctattatcttatgtttttatcgtccaactgttcccggcattctaaatgatacatcagaattgacaatgttgtaagtcctgctgtctctgttcttaaaatacgttttccaagtgtgattgggatcgctccggcctctttcgcctgctcgatttcgctctcgtcaaacccgccttctggtccgataaagataccgacagactgttccggttcaatcttacttatgacagcttctgttgctttcatcccttcctgcagttcataaggaacaagcactacatccagctctttcgcgtaattcatcgcttcctgaaagctcatcacatcctgcacttgtggcacaattcctctcttcgactgttccgcagcccccttggcgattgcctgccagcgttctctcttctttccggctttcttctgatctagctttacaaccgaacgctttgccgcaaacggaacaatacgataagctccaagctctactgccttctgcacgatccattccatcttatcccctttcggaagtccctggaataagatcagacgggaagccagttctgtctgagacacttcttttttcacaacgcgaaggactgcctccttctcctcataaccttccacactgcagaagtaatccattccttctccatcactgacccacacttcttctccgggtttcattcggagtacattcttcatatgattcacatcacttcctgccagacggatctgttctccgtccacgcaggatggatctgcaaaaaaatgttgcatcttatttctccttatgcgttcttgcgcgctgtcacacatacccattcaccctgatgtgtaacctccagaagttccagcccggcttttgcaacagcttcttttaccatctcttctttatcatcaataattccacttgtgatatagattccgcctggtttcagctggttcacgatcactggtgtgagttctacaagaaccggtgcaaggatattcgctgccacaatatcgtagcactcatatccaaccttatcctgaacttctttgtcattgataatatttccgatcattacttcatatttatctctggaaaccccgttgttctccatgttctcataagttgcatcgattgcacacggatcgaggtctgttccaacagaatgctctgctccgaacttcaatgcaagcattccaagaattccgcttccgcatcccacgtcaagaatctttgtcgtctctgttgtatactttctgatctgacggatacaaagttgtgttgtctcatgcattcctgtaccaaatgctgtacctggatcaatatggatcaccatcttatcttcatccgaaggcttcacatcttcccaggatggaataatcagaatatcatccacatagaactgatgaaaatacttcttccagttattcacccagtctacatcctctgtctgggattcttcaatctcgcaggctccgacatttacataagcagacatctcctccagttctttcttcacatttgccagaactttttctttgtcctcatcctcttccagataaaaacttaagtaagccacaccatcatctgcctcgatctccggtaaaatatcaacaaacatctgctctttatcagactctgtcagcgggatcttatcctcgatctcaacaccttcaatcccaagatctgccagcatactgcttacaatatcctctgcctctgttgttgtcttcaatctgaatttattccatttcatctagttttcctcctgaaaccacaaatctaaatctacgcttgcacgaattcccggaaccgtaccggcctcactgtactgccacatcttataatcatatgggcactgcggaagttcatgataatccgcataccagaaatcatattctgtcagctcttccatcttcaaggtaaatgccatccatttcatattagcataaatcatcggttgatatccagcctgtttcactccgtcacaaaagactttacaaaaattcgtaaagtcttcccttgtattctggtctgttcttgctgtatcatctttgatttcttctgtgtcatagacaacaggtcctgtaatctgatacggctggatatgttccaaaacaaagtcagtctcttcgactgcctccgttgctgagattgcctgggaaaagaaatagacaccgacttccagaccggcatccaatgcgccttgtacattctgttcaaacatggcatcttcaactaacgcgccactctctccatatgcacggtatccaagtcttacgatcacgaattcgattccgctttccttcacctgctgccagtcgatcgtctctccctggaactccgaaacatcaattccttttttcgctgacacttttcccttcgtatctttatacgaaagatatcctgtctcttcatctaatgccagattgctaaaatcataagaattccttggtacttgatcctgaagccttgctctgtaattattttctttcacatcctggaagtcatagtacttctttccgtcttctgtaacaatctgaactccactgacaatctgcgtgttttcctgcttgtctttcttcgtctgtcttgtcttcacgttgccggaacccacgccgacaagaataactgcaagccccacaagagccgccgccacccattgcttctttctcattcatttccttccaatcgcatctgttccgtaccgttgcagaaatgtttcccaggtaattttttccttattcgtctgctgcaagcacgatcatttcatctccggcttttattttaccaccatgaagcacttttgcaaataccccttctcgcggcatgatacattctcccattttctggaagatctgacaaccatgatgacattcttttccaatctgtgtcatctctaacaaaacatcgttacatcttaatcttgttccaaccgggagattacggaaatcaatcccctgaacgatcacattttctccaaatgcgccatcttctacttctgcacctcttgcacggaatgcctcgatcttgtcataagaaagaagactgatctgacgatgccattttcctgcatgtgcatctccttccagaccaaaatcttcaataaatgtgccttcctcgattcttgtcttctgtgttccctttgccggacttgtacaaattgctattacttttcccatttttctatacctctcaaattactttttcacttttataatttttgtgcataatctgcactgttacttttctgttactgattttatgttactgttcacacgatgtgtgaccagcaacgcatctcgccattttaaatcgcctttggcgatagggcgagatgcattcaagtcaaaacacgcatcctccgtgtcaatcagcggagtgattgacacgggagtgaacagtaacgattttatttcattactgatctaaccaccgattccgtacatggcccgatgttcttttttctgaccggcttcttcatctcttcgctcatcagagaaattgtgacaggccggttttttccagattgcctgacgcattgcttctttcagttcttcatccgttgcaccacttcttaaaagttttcttaaatcaattccactttcatactgtagacagagtttcagatatccttccgctgtgagccggatccggttacaggaatcacagaacttgtgactcactgcactgataaatccaattctgccctggaatcccgaaaagctcacatactctgccggaccattccccaaatgtttttcatacggttcagcgtttcctaatgctttctctaaaagttccagaagctcatctcttgattttccctgacaggcttttcccatcccgatcggcatcatttctataaaacgaacctctaccggatgctcctttgcatactctgccatctgaatatactcttcttctgactgattcatcggcacacaatttaacttcacacgcagattcggatattcgagtgctgcctgcagtccttccagtgcctgatttaattccccacatcttgtcactgtatggtaacacgtttcatccaatgtatcaatactgatattcactgcatccagcccctgacgcatcaactcgtccaactgatttttaagaagaattccgtttgttgtcaatgtcacctgttcgatccccgaaattctcttaattttccccaataagtccggcaatccttttctcaccaacggttccccaccagtcagtttaatctttgaaatcccaagttctgtactgatccggcatactctctcaatctcatcaaaagtcagaatctgttcatgcggcagctgctcaatgccctcttccggcatgcagtagacacagcgcagattacaacgatccgtcacagagatacgcagatattctattgttcttccatattgatcgatcatctcttacatacctcatattatttatctcttacattactgttttactttccttcagaaactggttttccacactcacttgcatttcctgtaagaattgcaagaccatgttccagagatggaagtactgcttctagattctcttttacagccttcggacttcccggaaaattaatgatcaatgtctgattacggatcacagaagcgccacggctcagcattgctcttggtgttacctgaagtgaagccagtctcatcgcctctgcaattcccggtgcattctttgtcgccacggcaagtgtcgcttccggtgtgcagtcacgcggtgcaaaacctgttcctccggttgttgcgatcagatccacttttttctcatctgcaagttcgcagaggcactgttcgatcatcttctgctcgtccggaagaagccttacttctgttacttcatatcctgcctcttctaacataccgcaaagaaacggtccactcttgtcctcccgctctcctgcatatcctttatcactcagtgtcactaccgctgctttccatctttgttctttcttttccactttacttttcgccttcttttctttccttcttatatccattgttgatcagcccactcttgccaccgctctttctgaccagatagatttccccaatctccatctttttatccatcgctttgcacatatcgtaaactgtcaaaagtgctacgcttgctcctgtcagagcttccatctcaacgcctgtcttcccggtcacacgtaccgtacaattacaataaattgcaagttcactctcaaccatctcgaactctaccttacactttgtgatcggaagaatgtgacacatcggaatcagatccgatgtcctctttgctcccataatccctgctgttgtcgcaactccaagcacatcccctttgcctgcagttccttctttgacagcacggaacacttcttcattcaccgtgatctttcctgtggcggttgcttcccggactgtgtcctgcttctccgtcacatccaccataatggcttttcctttttcatcaaaatgtgtaaatcccatttttttcacctctcaatctgaaaatgctgttgatatccacattccccttgcaaatatcaaccagacgattgctttttttataccaaacgattgtaccacagaatagtactaaaattcaatgttttggcaaaaagaaaggacaactataatagctgcccttttaccatcatcccatctttttctttaattcttgtatcgtttccagagtttctttcgtgatttccgcaatctgttccagtggtagtcccgcttcaatcattgataaaataatttctttacgtccacggttttctcccgtcttgatcaatatatcacgatctctgattgctttctgtcttgcttcatattcaagacgttttttctcgtccgcacttaatttgtccaattctttatacgcttcttcaaaacaagaattcttcttagccattttctcaaaatcctccctgcgtttaccattcaaaaagcgcatccactgcattaaatctgtttcactcttttgttccggcggtaatttgggcagttccaaaatatgcatttccatcagatctgtatattccttccccgtctttacatcacaaaacgaaatacgtcgataacactcatcatcttcttgaaataatacatgagcaagaatacttacttgaatacatttctgtaatctatcatagctatcaccttctcgtatctgttccgtatacatcttactcaaataataaattgtacgattcgcccaaaaatcataataaaccacctgcatttcaaaatcaatctgtacttcattatctaactgcacccgaacatctagaattccatacttatcatcttccgaatcctttcttaggattgtggggagaagctcagtatttacaatttcatctggacgcttgtttaatatagctgcaataattccttttctcacattttcattttgcatcaactctttaaagcaaaaatcaactgttggcaacataatgaaatcttctttttcatttaatgcattttcacttttaattgcacttttagatacttttcttgggttttctttcataagaattctccttttcgtttttgtaagacaaacacttatatgaaggaaagaattctttatccaaatttattgtaacataggtttttttttcagaaaagcagaacttttaaacctgatcctttaataaactttcagttatcattcatacaatattcgtcttatgttttgttatcggattatttgttcgaatactgaactatggaaataattaccgattggttaatagatatctttgctgttcataagaataagaactgcgtgaatttaggctaacatatatttccgaaaattacaacctctttttgattttccgtttaatagaaataaggacaactataatagttgcccttaaaatcaattattaaaattcaatattccgcatctcatctgacttctccggaatcttatgtctttccgcatatcctgtaagaatcagcgtaagtgctccgtccccggttacattacaagctgttccaaaactatcctgaagtgcgaaaattgtaagcatcagtgctgttcccgcatcatcaaacagaaggactcctgtgataagtccaagggatgccataactgttcctcccggaactcccggtgcaccgattgcaaatactccaagaagtatacaaaacagaagcattgttggaattgacggaagttttccatacagaatctgtgagattgtcatacagaagaacacttctgtgagtacagatccacacagatggatattagcaaacaacggaattccaaactgtaccatatcttttcttaatggtttcgcctttcctgcacactgcagagcaactccaagtgttgctgcggaagacattgttccaacggctgtcagatatgccggtccgtaatgcttcacaacctccagtggattctttcctgaataagcaccggcgattgtataaagaagtgccatccagatataatgtccgatcataacaataatgataaccttaaggaataccggaagctgttttgtaatggatccttcatatgccagagaacaaaatgtgaatccaataaataacggaaggattggaatcaaaatccttgacacgatggaaagcacgatcttctggaattcttccaacattcctgtgattaattttgccttattccatgccgctgcaagtccgatcataatagaaaatacaagtgcactcataaccggcatgatctgtgggatagaaagttcaaacaccatctccggcagttctttcagtccatctacatctgtcacaatagaaagatgcgggatcagcgcatatcctgctgctgtagagaataacgcagccccaacagaagatacatatgcaatacatactgcaagcagaagtaatctcgatgcattatttcccatctttgtaatggacggtgcgataaatccaatgatgatcagcggaacgcagaatgaaataatctgtcccagaacatatttcaaagttacaataatgttcagaattgcatttgtcaaacctgtcccgtcatttgcattaagagcaagtccggcaagaattccaatcacaacacctaccaaaagtttaaatggcaggcttttgaaaaaactagattttttcataggaagaatcctccaatactatttttcggtcctaattcacagatgtctgtaatctccaacctttctcagacctgtttagtctgtatgcaatattataatacacgaaggataaatctacaactgcctgtttttggcactttttatcttctcatcacatcgtccgcttacgaactcacctttattctttacttttttataattcatgataaaatatttgtaatactatatcgtgtttaaaaggagattttaaaatgttagtatgtgattatatcgtagaacagatcgacggagattatgcacacttaagaagagttgatcttccggatgaagagttaaaactcgtagccagagcactgctcccggctgagattgtagaaggttgtaaactgcactatgaactgatgcagtatacaatcatctaatgttactattcttctacctgtttttattcaaagaagactgtaaagaggattcctgcctgaaaatatttcattttaaataaaaggaaatatttttcaggcaggaatcctctttgtacgttttctctaattcattccttgtcaattaatcttcatcaaacggaacaacatcatcctctgcattttccacagcttcaccagaaccacctgctttcggtcctgcaacgccttttaccttcatcgttctgacattgattccattgacctcaatatggtcatccacaggaatcacaaggcactgtcttccgtcgatcattcttgtctctacaagatccattctgtccggatttactttgatcacaacatccggtgtctcgatattgaactttcttgtctctgcgatattacttgccagaagcgttgctttctcgcctgcattttcttcgaagtttttctcaaagttctccatcttctcattcggcacaccgctctgctcgaaaatcttcttcacgtccgttttatccaatgtcagcggatccggttcttctttgtgttcttcgatcatatcatttaatgtctcgtgaatgttacggacagtctcgtaatcaccatcttctcccaatgtatcttcaataatcatctggaatgtctctttctgtgtgtccgcagacatcggcatcttcgcaccaagaagctggtcgatcatctccggctgaagatcttctgatttcttcgtgtaataaagcacactgtgaagatcagtacttctgtcgttgaatgccgggaagaggaatcctttgtccggcttatcaacgatccagtcacggattctgtcctgaatacagttctcttccgcgttatagctaagccctgcctttgacagactgaccggacagatgctcatcagtatatgctgatatacttcatctgaagcatcatccatctcaagatcatcggatgttcttccaggaacatcgtatgctgcatggatcaaaataatgtaataattctccgcatactcatacgttgcaataactttgtcatagaattcttccagaagcatatcgtcttcgagacggctgtcacgaagcttcagaagaaattcctgtgttccgcccggcatctctgcatccagtggaaactccatattcagcatattctttccgatacttccggaaagcgtcttcttaaaaatatcaaaatacttaaatgcttcttcctccggaagtgcgagaaatgcgtcttttgactccatctttttattcttctcataatccacatagcagccacagattttcgtaatcgcacagtttttcggtgagaactgcttacggatctcaagtacttcttttttattcatatatgtttcctttcttcgttctatgttataatgagtaaaaccatcttttcggggattgtaaataccgtagacataacatttttattttacctctattttcataagaaagaaagatttgattttctcaaaattctatggtattatacgcattctgaaaatacagaaaggaattttttattatgtcatccaactcagttactttaactgcccgggaacatgtatttccactctttgttaaatatgtctcagcaaatgtactcggcatgatcggatattcctgttatatccttgccgatacattttttgttgcccggggaatcggctctgatgcgattgccgcgcttaatctggttcttcctgctttcagcttgttaaacggaacagggctgatgatcggtatgggtgctgctgcgcgatattctctttcctccggcagaactgacagtgagattcaccgcacgatcttcacccaggcacttcagcttgcatttgtagctatgctgttctttttcagcatcggactgttttttgcaagacctctttgtgtcttactcggagccgacggaactacattgccgcatgcgattccatacatccgcatcctgcttatgttctctccgctgtttttgtgcaacaatctgttgaactgttttgtcagaaatgatggagaaccgcgactttcaatgactgcaatgctcgttggaagtctgacaaatattgtgctggattacattttcatctatcctatgcagcttggcatgaccggagctgcactggctactgcaaccgctccactggttggaatgagtattctgtccatgcatttctggaaaaagaagaatcagtttcatctggtaaaaacaaggatacatctaaaaactgctgtagatatctgccggcttggagtttcttctcttgtcgctgaattatcttccggcatcgtaattcttgtctttaacatgctgacgctgaagttcagcggaacgaccggacttgcggcatacagtatccttgctaatatcgcactcgtacttgtggcgatctttaccgggatcgggcagggcatccagccgattgtcagcagccaccctggtaaaaatggagctcctgtacgccaccaggtaagacgttatgcattaagcactgcattacttatggctttcatcgcctatctggttgtgtttgtctttgctgttccgattgctgacttatttaataaagacaagaatccgctgcttacttcaatggcagcagaaggaatgcgcatttactttgtaagcctgttcttttcaggcatcaatatggtgtcagccacttatttaagtgcttccgaccagccggtaccgggattcatcatttccatcctgcgtggacttgtactgattctgccgattgctttcctgcttgccgcactttttggaatgacaggtatttggctctgccttcctgttaccgaagcaatcgtgtgtgtcgtgaccttcttctttctgagaaaattttaagtaaagtatttataaaagaagaaccctgttacgaatgtattgattcatacatctcataacagagttctttttttatcttattttaaatatttcgctgtctcaagaatacggtttgcattctcaattctctccggtgtcggaggatcgattccctctaacttgtaatcatatcccagttctttccacttgtatgcaccaagtgtatgatatggaagaacttcaacacgctctacattatccagtgtctcgatgaaatcatggagtctctccaggtactcatccttgtcactgcgctccggaacgagtacgtgacggatccagattggtttcttgatatcagacagataacgtgcaaactcaagaatattcttgttgctctgtcccgtgagaatcttatgctgctcatcatcaatgtgtttaatgtcaagcatcagcatatctgtgtatttcagcaactcctgcagtttaccaaagaatggttcttcctttgtaaatacagctccgcttgtatcaatattggtatgaactccctgttctttcgccttcttgaaaagatcaatcaggaaatccatctgcatcagaggttctccaccgctgactgtgataccacctttatctttccagtagcttttatagcgaagtgctgttttaagcagttcgtctgttgtcttcagttcgccgtcctgcatcttccatgtgtccgggttgtggcagaactggcagcgcattggacatccgcttacaaaaataataaagcgtacgccaggtccgtcaacggaaccgaagctttctgttgagtgaatgtatccttttacttctgacatatatttctccttctttttccggcagtttcctgccattcttctgcaaccttcagatttgtcttctggcatttctttataattgcaggtcttatgaaaaaaggacgcagcatggtgaaatgactgcgtcctgatatattatctgttatttatgatcttttatccgcaaatcgcaacattatttacatgtggtcatggcaagttcttgcgataacgtcaagctgctgctcacgagtaaggtcgataaacttaacagcgtatcctgatacacggattgtgaagttagcgtactcaggtttctctgggtgctccatagcatctttcagtttgtcaacaccaaatacgttaacgttcagatgatgtgctccctgatcgaagtatccgtcaagtacgtgagcaaggttctctttacgctcttcatcagaatgtccaagtgcacctgggttgattgtctgtgtattagagattccgtcaagtgcaagctcgtaaggaagcttagcaacagagttaagagaagcaagaagtccgctctgctctgcgccgtaagacgggttagctcctggtgaaagtggctctccagcctttcttccgtccggaagagatcctgtagccttaccatatacaacgttagatgtaattgtaaggatagatgttgtcggtacagaatgtctgtatgtgtgacacttgttcagtttgtgcatgaatttcttcagaagccatacagcaatctcatctgcacggtcatcatcgttaccgtatcttgggaagtctccctcaatctcgaagtctgttgcaagaccatcttcgtcacggacaactttaaccttagcgtatttgatagcgctcagggagtcaactacatgtgagaatccagcaatacctgttgcgaaagaacgtttaacatctgtgtcgatcagggacatctgagctgcctcatagtagtatttatcatgcatgtagtggatcatgttcagtgtatcaacatacagcttggacagccactccatcatctggtcatatttctccattacttcatcgtaatcaaggtactcggaagtaattggctggtaagccggtcctacctgtactttgttcttctcatcgataccaccgttgatagcgtaaagaagacacttagcaaggtttgcacgagctccgaagaactgcatctctttacctgtctctgtagcagatacacagcagcagatgctgtagtcatcgccccataccggacgcataacatcatcgttctcatactggatagaacttgttgttacagaaatcagggaagcgaacttcttgaagttctctggcagtcttgaagaataaagaactgtcaggttcggctctggtgaaggtcccatgttgttcagtgtgtggaggaaacgatagtcgttctttgttaccatagaacgtccgtcctgtccaagtccaccaacctcaagtgttgcccatgtcgggtctcctgagaacagctggttgtaagatgggattcttgcgaacttaaccatacggaatttcattaccatgtggtcgatgatctcctgagcttccttctctgtgatctttccagccttcaggtctctctcgatatagatatcaaggaatgtagagatacgtcctacagacatagctgcaccattctgagtcttgattgctgcaagatatccgaagtacagccactgagctgcttcatgagcatccttagccggctgtgaaatatcaaatccgtaagctgcagccatttctttcatttctttcagagctttgatctgatctgcaagctcttcacgaagacggaaatcctcacccttcatgccgtgtcttgcataacgctcgaagtcatactgttttctctcgatcaggaagtcgataccatacagtgcaacacgacggtagtcacctacgatacgtccacgtccgtatgtatccggaagtcctgtaataatcttgttatgacgagctttcttcatctctggtgtgtagatgtcgaatactccctggttgtgtgttttatgatattttgtgaagatctcatgcagtttctcgcttggctggtatccgtatgttgtacaagcctgctctgccatcttgattccaccataaggcatgaatgctctcttcagcggtttgtctgtctgcaaaccaacaatctgctcaagatctttcatgctctcatcgatatatcccgggccgtatgctgtcagaccggaaacaacttctgtctccatgtcgagaactccgcccttagctctttcttctttctgaagttcctgcagtcttccccataatttgtctgttgcttctgttggtccctcaaggaatgactcatcaccttcatatggtgtgtagttctcctggatgaaatcacgcacgtctacagagtgtgtccattttcttcccttgaagccagcccactgctcaaaattagccattgaaaaatcctcctatattctttcctaaaatagttttgtaattgttttacgggcatagtataacaccgtgttaaataaatgacaagcgtaaaatcgagaataaatatcggaaatcgctttgtattcgatttagtacaaaatatacgaaaaaacgcccattttacggggaattgtacgaactttaatacagtaaaaatgtactgtaaaaagaacattttccccatgtgtacggtctgatttacagacaaataaacagcctctttttctttcaaaattcactctaggtacttttcctctatgataacgatttcgtttcatgttttctctatatttttgtcaatggagttacgttctgttttttgatataatagtgcattagcgtatctatatttagtttatgaaagaggaatattatggaaatcagaaagacaaaaccagaagagcttgaagtacttcttaagatgtacgaacatgcacgcagattcatggcaactcacggaaatgcttctcaatgggaaaacaattatccttctccacagttaattctggatgacatcactgaggggaacagttatgtctgcacagaaaaggaccagatagttgctactttctattataaagaaggggctgatccgacttacatgcgcatctacgaaggtgaatggatcaacgactcccgttacggagttgttcaccgcatcacttccaccggaaatgtaaaaggtgctgcttccttctgcctgaactgggctttggaacaatgcggcaatatccgtattgatacacaccgggacaatatcgtaatgcagcatctgttagataagaatggattcaaatattgcggaatcgtatatgttgaggatggaacagaacgaattgcttatcagaaagtggtttaataataccaaaatccataaagcaaggagcagagacatttgattttaatgtctctgctccttgttgctatatgtctcacagaatcttgctgcgaaggacggttcttctccacctgcatagagatgtgagatatctcctactttcaatcctcggaaatatgccgttccctgttctctctcttctgttactacttctgtcacagaagtcggtgcaagcgcaaggcaatgccaaagcacgaatggtgatacattccataaatgggacaacagcacacagctgattccgaaatggcagaaaaatgtcactgtctcatcactttctttctccacacgataatgcgccccttctcttacatatccatgctctgcgagaaagcgatcaaattcttcaatcacatgatcgtatacttctacaagatcagaatttttcgccacttctgtttcacgccatgcatttttatccatataagcttcatgttctgtccaataccccggaaccatatcccatgcaattctaggcaggaaatgctcaccttcttttttcacatcgggatatgctttttcaagttccggatttttattcaaatcaacctgcgccgggaactcttgcagccaatccaatatttctgctgtttttccagttacctcaagacatggagtcgccgtatccttcgctcttccaagtggagacttatagcattcccccatattcatagatactgcacgttttgcaagcagtgccgcttcacgtcttcctttttctgttaatgtgtcatttacataatccggatctccgtgacggatcaatagaattctcatcttgcttctcctttgtaatcaattattttctccagccattcctctgccagtttgggccagatctgtacttctttcagagtctttcggatttcttctttctgctctactgtccatttcggtggctgtgttcttccaattccatttttcacaagcagttcttctcccatttcctttggaaatgaagtttctcccgcaaggattgcttctgccagcatacggagttgctcctgtgtataaggttctctccctctgcgttccagccagtcctctgttgcaacagacataccatgcacgccttctgaaaatacatgatgtgcgaatggaactccttcttccagacatttctgtgctaaaagataactattctgcaccggaactgttccatctgttgctgtctgccagataaagcatggtggcatttcttttgttacatgcttttcaattgacatatattctagctcttttcttgtaggattctttccatataatgctacaaaagaatctttatgtgtgtactttcctgtagtgattaccggataagacagcacagcagcatccggtttgtttgaaaacttctgatatttttcatccggatcctcgatatccgctccatgcacacacagactcgcacacagatgtcctccggctgaaaatccacagaccacgatctgatctgacaaaatatgtaactgctccgaacgaaaacggatgattcgcattgctctggaaatatctttcagcggctgaagctttaatggtgcttcatccagtggattcactgtatattcaaggacgaacacattataaccagcctgataaaattccatagcaaccagatgtgcttccgaaggcgatacaagtctgtaaccgcctcccggaacaaccagcatcgccggatgcatcagctcatcctcatgaatatagctgaccataatcgggataaacccatgcgccgccgggtaatgatattcttctttgtgccataattctattctttcgcctatcatgtgttaatttctcctgtatgatttataatttgtgcttttctgttattcttttaggagcacggactttgctcgttgctcgcgtaaaaaagccacgaaagacaagatcccccaaccttgtcttccatgactcccattacatacactcaacttgctttacagttcgaatccttccagatatggattctctgcctcagaaaacttctcttcctcaaccatctgcgcgattgccgggtcaagtggcatctttccgagaaccggaacattaagatcttctgcaatctcatcaatgtggctttctccaaatactttaatctctttgccacaatccggacacttcacatagctgtagttctcaacaattccaagaaccggaatattcatctgcttcgccattccatatgccttcttcacgatcatctgtacaagatcctgcggagatgtaacaatcacaacgccgtcaaccggaagagactggaatactgtcaacggaacatcacctgttccaggtggcatatcaacgaagagataatcaagatctccccacataacatctgtccagaactgctttacaacacctgcgatcactggtcccctccaaataaccggtgcttcctcgtcttccaaaagaagattgacagacatgatctttgttccatctgctgcttcacatggaagaattccctgctcagttcctactgccatctcatgaagtccatacatctttgggatagatggacctgtaatatctgcatccatgatacctacatgatatccttttgctctcatcattcttgcaagggatgctgtcacgagtgacttaccaacaccgccctttccactgacaacgccgatcacttttttaatagatgaatacatgttcatcggttcatgcatatcaactttcttacttgtgcatgttcctgcactggcacagctggcgcaggattcctctgaacatcctgctgttttctgctcttctgccataataccataacctcttttctacaaataaatagtggtatcattgtagcacattttctcacagaatgataggctgaacctatgcttttatttttctaagtgttatacttatgtcaattgttatgttaattcttaattcattctaacttgaatacaattagaaaggagttttcctatatgccagtaatatccgaacaacttaagccgattgacactgtcaatggattccagatccgtcccggctttttccgtgaatttggtgcagtcgctatcccgggtggtgtcaactttacaattcatacacacggtgctacctcctgcgagcttctgctgtttcaccgcaaagccgaagaaccttacgccgtgattccatttccggaaagttacaggatcggattctgctattctatgatcgtctttgatctggatatcgaagaatttgagtacgcctatcgattggatggtccttatgatgaaaagaaaggactccgttttgataaaaacaaaatcctgctggatccttatgcgcgcgccgtcaccggacagagccagtgggggcatgtaaataacgcccagcatggttatcgtgcccgtgtggtacaatccaactttgactggggtgaccagcgtcaccattctattcctatggaagacttgatcatctacgagctacacgtccgcggatttaccatggatgaaagttccggtgttaagcaccacggtacattcgaaggcctgcgcgaaaagatttcttatttgaaagaacttggagtcaatgctgttgaactaatgccaatcttcgaatttgatgagatgcgtgatgtacgattgattgatgaaaatgaacttattgatttctggggatataatccagtcagtttctttgcaccaaatacaagctactgttcttctatggaatataaccgcgaaggactagaactcaagacactgatcaaagatctccatgacaatggtatagaagtaatcctcgatgtcgtcttcaaccacactgctgagggaaatgaattcggtccgtgcttttctttcaaaggctttgacaataacatttactatatgctgactccggacggacattattataatttcagcggatgtggaaatacattaaactgcaatcaccctgttgtacgagacatgattttggaatgtctgcgttactgggtcatcgaataccgtgtagacggattccgttttgatcttgcttccattcttgggcgaaatgatgacggaacccctctaagccaaccaccgcttctgcgaagccttgcattcgactcgatccttggaaatgtaaaactgatcgctgaagcatgggatgccggcggactttatcaggtcggttctttcccttcctggaagcgctgggctgaatggaatgggcgctaccgtgatgatatgcgccgctttttaaaaggagatgacttccttgcccagactgctgcagcaagaatcacaggttctcctgatctgtacgatcctgcttaccgaggtggaaatgcttccatcaactttctcacctgtcatgatggattcacgctttatgatctgtacagttataaccagaagcataatgaagccaacggttgggggaacactgacggagctgacgacaataacagctggaactgtggcgtagaaggcgaaacagatgatcctgccattctggcacttcgtaaacgactgatgaaaaatgcctgtgccattctgctttgcagccgcggaactccaatgttcctctccggtgatgaattcgcagacacacgttatggaaataataacccttattgccaggataacctgatctcctggctggactggagtctcctcaaaaaaaataaggatctgttcgatttctttcaatatatgatccagttccgcaaaaatcaccctgtcatccgtaaggatctcgagccaagctatcttggtgttccggcaatgagcacgcatgggctcactccggatgagacaaatttctccggtgacagccatgttgtctgtgtacgattcgcaggctataatgaagcaacccaaaaagaagaccttgtttatctggctgtaaattccggatggtttccggttacactcactctgccggaacttcctgaacattacaaatggaaagttgcggtcaacaccggcgatcctaaatgtcagttttttcacaaaaattcaatgcctacggtagaatctaaaatatttttaggtgaacgctctgttattattttcgttgctaccgctatatgaattaattttttagctgtttctcaatattttttagaatatttttgtttattttgacaagcttgttgtttgtataacaaataacaggcttgtcattttttaaacttttcttgataattttgagatttatttgtagaatattactaaacaaaactttactggtttgaagataggttttttcaaatacatttcctattttaaaatcagtcagtaatgaacgttatggtaaaaggagaggtttaaaatgagtagacttgaaatcccaggtccagacaaaggccagctcgttgttgaagagctgtacaaagatctggaacgcagaattgaatccagccctccgggattatgtccggttgacatgactcgtgcatttatcgagatgtgtcagacacaatcctgtggaaaatgtaccccgtgccgcgttgggctgtggcagttgaagaaccttctgacagatgttatgaacggtactgctacaatggagacacttgatctgattgacacattgtctgaatccatccgcgaaggatctgactgtccgatcggatatgaagccggtgccatggtacataagagcttaagagactgtcgcgaagattatgaagaacatgtccgtcagggacgctgtacctgccactatacacagcctgtaccttgcgtttctctctgtcctgcacatgttgatattcctggatatatcgcactgaccggagagggccgttacgctgacgcaatccgtctgatccgtaaggataatccgttcccgacaacctgcggttttatttgtgagcatccttgtgaggctcgctgccgtagaaatatcgtagatgatgccatcaatatccgtggactgaaacgaatggccgctgattatgcaggcaaggttccaccaccggaatgcgcaccttccaccggaaagcgtatcgctgtcgtaggcggtggacctggtggactcagtgctgcttactacctgcagttgatgggacatcagacaaccgtattcgagatgcttccaaagctcggcggaatgctccgctatggaatcccgaactacagacttccgaaagatcgtcttgacgaagacattcaggcaatccttgagacaggagttcaggtagaatttggaaaacgtattggtaaagatatcacaattcagagtctccgccaggaatatgatgctgttcttatttccatcggtgcaagcactgataagaagcttggtatcgaaggcgaacatgcagaaggcgtgatctctgctgtgtccttccttcgtgatgttggagaagacaagagccctgatcttaccggacaggaagttgctgtcatcggtggtggtaacgtttccatggacgccgtccgcacagcaaaacgtctcggtgctaaaaaagtaagtatcgtttacagacgccgtactgcagatatgactgctcttccggctgagatcgaaggtgcagttgcagagggaattgaagtactcacactgaaagcgccatccagaatcgagactgatgagaacggacacgtttcaggtatctacgtcacaccacagatgatcagcaagatcaaagatgggcgtgcaagtgtctgtccgacaggtgaagaagatttccttatcccttgtcagacactcatcgttgcaatcggtcaggatatcgaatccgaacatttcgcagaagccggtgttccggtttcccgcggtaagatcatgacagagcgttatggcggtttcgacaatatccctggcgtattcgccggtggagactgtgcatccggtcctgcttccgtaatcaaggcaattgccgctgcaaaggttgttgctgccaatatcgatgaatatcttggtttccaccatatcatcagctgtgatgttgagattccggaacctcgcttaagcgaccgcgaaccttgcggaagagttgaactgacagaacgcgaagcatgcagccgtgtctgtgactttgaaggcgttgaaaactgtatgacagaagccgaagcaaaacaggaatcccacagatgcctgcgctgcgaccacttcggttatggtatctttaaaggaggtcggaaagaaaaatggtaaatattacaattgataatcagaaaatatccgtaccttccggaactactatcatggaagctgcggcaaaacttggaactccgattccgaaattatgttatttaaaagatatcaacgagattgcggcatgccgtgtctgtgttgttgaaattgaagggaaagatcgtctggtcacatcctgtaataacgttgtaaccgaaggcatggtgatctacacgaacagcccgaaggtacgcattgcaagaagacagactgtacagcttatcctttcccagcatgactgcaaatgtgcaacctgtgtcagaagcgggaactgtacacttcagcaggttgcaaatgatctgaacctgatcgatcttccgttcaaagaacgctttgaagatacaccttgggacaagacattcccactcatccgtgattcacgcaaatgtatcaaatgtatgcgctgtatccagatttgtgacaagatccagggactgaacatctgggatgttacaagtacaggttcaagaacaacgatcaatgtaaacggaaataaaaagatcaatgaagtctcctgttctctctgcggacagtgtatcactcattgtcctgtcggcgcacttcgtgagcgtgatgatacagaggatgtatggagtgcgattgctgacaagaagaaagtggtggttgcacaggttgctccggcagtccgtgccgcatggggagaagctctcggcctgtccagagaagaagcaacaatcggaaagatcatggatgccttgaaaaagatcggcgtagattacgtcttcgatacttctttctccgctgaccttacgatcatggaagaaggaaatgaattccttcagcgtttctccaaaggagaattaaagctgcgtccgatgttcacttcctgctgccctggctggatccgtttcatcaaatcacagtacccgcatctggtaccacagctgtccacagccaagtcaccacagcagatgttcggtgctgttatgaagacttattttgcacagtccatcggtgtcgctccggaagacatttacaccgtatctgtcatgccttgcgtagcgaaaaaaggtgaacgcaacatggaacttttctacggcgagtatgccggacatgacattgacacagttctcactacaagagagctgacaagaatgatccgtgctgcgcatattgatccaaagagcctgaaagaccgcgaatgtgatccacttatgaaagagtggtccggtgccggtgttatcttcggtgctaccggcggtgttatggaagctgcacttcgttccgcacactatcttgtaacaggacgtaacccggatccggatgcatttaagatcgtccgcagtccatcctttgagacgggtgttgtagaagctgaagtccagatcggtgatgccacgatccgcgctgctgttgtcagtggtcttggaaatgtacgcaaattgcttgaagcaatcgagcatggcgaagtacattatgactttgtggaagttatggcctgtcctggcggatgcgtcggcggaggcggtcagccgatccacgacggcgaagagcttgcacacacacgcggtgcaaacctctacttccttgacaagaacgcaaagatccgtttctcccatgagaaccaggatgttatgaaattgtacaacgatttccttgagaaaccattgtcacacaaatcacatatgctgcttcatacagatcatacaaagtgggatatgcctagataataattcctatataaaacaagagccagaacagtgggaagatgcggtgctgtttctggctcttgccaaaatcaggcaggacggattcattttcccgacctgcctgattcatcatattcttattctactgttacactctttgcaaggtttctcggcttatctacatcaagtccctttgcaacacttacataatatccgagcagctgcagcggaatcactgcgagacttcccataaagtgctcatccaccttcggaacataaactgtaaagtctaccttgtcttccatctcataattgccatagtttgtcacacccatcagatatgcgccacggctcttacattccatcatattgctgactgtcttctcatacagcttgctctgtgtcagaactccgattacgagaatattgtcctcgatcagactgattgttccatgctttaactcacctgccgcataagcctcagaatgaatataagaaatctctttcagtttcagacttccttccagacatactgcatagtccactccacgacctacaaagaagacgtcatgcgcattcgcatatttggctgcgaaccactggattctctccttatcctgaagaatcttctcaatcttctccggaattgtctgaagctcggaaatgtaatagctgtactgctcgtctgtgatcagccctttcaccttcgcgaactgaactgcaatacaatcaagagctacaagctgtgcgctgtatccctttgttgtagcaaccgaaatctccggtcctgccagtgtatagaacaccttatctgcctcacgggcaatactgcttccgattacatttacaactgcaagtgtagcaagtcctttatctttcgccatacgcatagctgccaatgtatctgcggtctctccggactggctgatcacgataaccagaccatccttcacaagcggcatctcacggtaacggaactcagatgcaagctctactcgaaccggaatctgagccagctcctcgatcacatactgagcctcaactcctacatgccatgcagaaccgcacgcaacaatgtaaatctggctgtatttcttaatctcttcctctgtaatatcaatatccgtaaagtcgatcactccgtctttcacaacagaattcagagtatcacggattgctttcggctgctcatagatctctttcatcatgaaatgctcgaaaccggccttctctgctgcctctgcatcccatttgatctctgttgtctctttctcgatctcgtcaccattaagatcatagaaatgagcctctcccggaacaagctttgcaaactcaaggtttccgatatagtatacatttcttgtgtatttcaggattgccggtacatcagatgcaacataagtctcgccatctgcaataccgatgatcatcgggctgtcttttctggcaacccagatctctcccggataatccttgaacatcagctcaagtgcataagaaccacgtacacgaaccatagtcttggcaatcgcatcgatcggtcctaagttatatttcttataatagtagtcaaccagtttgatcactacttctgtatctgtatcactgtagaatgtataaccatgctttaacagcttctctttcaactctgtatagttttcgataataccgttatgtactccgacaacctcagactcaactgtaccggatccacttctctcacagtttccggatacatgcggatgtgcattgatctgacttggctcaccgtgagtcgcccagcgtgtatgaccgataccacaatttcccttgagtgccttaccactgtctgtcttctctgaaagattactcagacgtcccttcgccttaacaacctgtgcaagatgctctccgtcacgcactgcaagacctgctgaatcatatcctctgtattccagcttagacaatccgtccaacagaatcggagctgcctgatggtttcctgtaaatcctacgattccacacataaataattcctcctattaactatctgcagttactgttcacacgatgtgcgaccagcaacgcatctcgccattttaaatcgcctttggcgatggggcgagatgcattcaagccaaaacatgcatcctccgtgtcaatcagcgaagtgattgacacgggagtgaacagtaactatctgcatccctctctacaaatagttatatacatttccatgttgttttcccttttcaatgagcctatcactttcgtaattgttacaaaaaagttaaataactcattcgttagtgtaacacagataggcgaaatagggaagtaaaaaatgcattttcttaatcactttcccatcactacagtggccagtccgggaaccttccgttcacgatcgcatgcatgatcctgtccttcgcccctggcgtctccctgttgatctgctccatcaactgttttgcatacgctctttttgttgaaccgtctaccgggcacgtattcttaaccacacggattccctggtctgcaacaaagtgcgctacacctcgctccggaacatacatcatcggacggatcaccgtcactcccgcttccggcaattctgtcaccggtggaaacgcatagaaccggccttcatagatcaatgacatcaatgctgtctctataaaatcatccttattatgtgcatatgccatcttattgattccaagctctcccagccgttgatacatcgcacccttccgaagctttgcacacaaagaacacggtcttatatccttattctcctgaaatacgatccgggcaatctctgtatcaacctgctcataaggaatctccagatacttacaaaactctgctacacccgtaaaatccatcccttcaaatcctacgttgcaggtaatcgcagataattcgaacctcttcgggtaaaatccctgcagcagcttcatcgcataaagcagagtcagggaatccttgccgccggaaacacctactgcaattctgtcaccgtcttctatcatgttgtaatcttgtatcgcctgacggatcagacttaataatttctgttgtttcatacttccttcattttttctttcactttatccggtacatcaatcagtccaaatcgataaaacattccataaatgttcattacataaccttccaaatattagtttcataatatcacttttccataatactttacaacaattttgcgaaattcaggttgcggattttgtaagcacctcttatactttattattatgtatgaatgcggagggatgaaagcatgaagatacttctgatcaatgggagtcctaaaggtaaaagaagtaattcattaaagctcgcatacagttttattgaaggatttaaaaatggatgtacggatgatgaagaaagcatctccatcgatgaactccatgtagcttcaatgaatatagctgcgtgtaaaggatgctttgcgtgctggcagaaaacgcctggcatatgctgtatcaaggatgatatgcaaaaggttattggaaaactgattgatgctgatcttattctgtggtcttttccactgtactattttaatgtcccaggtatcttaaagaatttgatcgaccgtcagcttcctatgaaccttccttttatgagttcaaaacagaacggatacggaagcggaagtcatgactccagatatgatatggaaggtaaaaggcatgttctgatttccacctgtggcttttattctgctgttggaaactatgacagcgtattgcggatgtttgatcattttctcggcaaaggaaattatacgaccatcttttgtggtcagggagaattattccgtgtaaaagaattgtctgcaagaacagatgaatatctttccactgtaaaatgtgccggctcagaatatgcaatgaccggaacaatctctgaagaaacagatgcaatactccacacgcttttatatcccagagaggtatttgaaaaaatggcggatgccagctggggcataagtaaaacgaccggagaaaaagaaccggatgatcttgtatttacccggcaaatggccgctctttataataaagatgcctacgatggaaaagaccgcgtgcttgagattcactttactgatttggatcacacctaccagattcagcttagcaagacaggaagcgaagtatttactgatggacgtctttctccaactactcgcatagatacgccttttactgtatggtcagctatttctcgtggagaaatcggtggcgcagaagcattggggaaacagatgtatacggtatccggcgacttttccttgatgattgattgggataaaatcttcggaagcgcatctgtggtcaaaaaaacagaaaaaacacctcaaaatacaattgaacagaaaaagccttccatgacgacaatgctgataccatggattacgttctggatcgctgtttctattcatccgaaagtcggagctgtgataacactacttgtggtcgcaacagtaccgtttattatgagaaaacataaatttgtcatctgggatcagctctctatggcagctgttgctatactttctgcagcggcaaatataaccggaaacggagttcttccaacaaacatcggatatcttgtatttggactcttctggctgctttcatgcctgacaaaagaacctttatgcgctgcatatgtaaaatataattatgggggtgaaaatgcgcatcagaaccctctctttatgaagacaaattatattcttgccacggcatggggcacgctatatgtactgacagcaatctggacctttctgtttaagaaagccgggtttggaaatgtacttattcttgtgaataatctgattcctatattgatggggcttttcacagcatggtttgaaaaatggtatcctgcacggatggcaagaggcaagagaaaatagtattttctcttgcctcttgtgattcttaactacctctttcaatatatcttctgtacgcccaatctttgacaattctaagataacatctccatgtttaaatctacaactctttcaacaattcttccttactgaaacttccacttcccatttcttctccgccaataatctggtcagcaagagccatcttcttttcctgcaattttacaatattctcttctattgttcccttggcaattaatttgtaaacggttactatattctcctggccaatcctgtgtgcacggtctgttgcctgattctgcacagcaagattccatatattctagcaatacagtgtttgcccccccattataactgtaatacgcagggcactcacatgtcatctcataaacttcctgatctgtataatcatattcttctgtgatcatatctctcctgcacttccgttacatattattgatatctcttgcactatttatattcctggcactattacaatactgctctgcctcagtatgctttgctccattaatatttataactcaaactctttcaacagcttttcctgatattccttgtcaactgccgcttttaatatatcttctgtacgcccacgctttgacaattcaatatttaactggttgattctgttttctccttcttctcggccagcttcaattcctcgtctttctgcggttaacattcctatattgtaatctctgatcgctctttgtcttgtctcgtattctaacctcttcttttcatctgcacttaatttatccaatacgtcatatgcttcttccaattcagaatttttctttgccatttcttcaaaatcctttctggtttttcctccaagaaagcgcatccactgcaacagacttgtctcattcttctcttccggcggaagtttcgacaattctaagatatgcatctccataagatctgtatactcttttcctgtctttgcatcacagaatacaattctgcgataacattctttatcatcttgaaagtgatcatatgcaagaatactcacatggatacacttcttcaaacaatcgtatccctcaccttctttgatttcacctgcatacatcttactcagataataaacagaacggtttgcccaacaatcaaatgcttctacctgcatctcaaaatcgatctgttctccatctttcagtttcacccgaacgtctaaaatcccatacttatcatctttcgattccttcctgagaatggttggcatgagttctgtgttctctacctcactgggcggaacatttaataacgctgcaataatattcttacggatattgtcattctgcatcaattccttgaaacagaaatctaccgttggaagcatgataaagtcttcctgcttctctttcgatgctttacaatgtgatgatgctcgcctggttgatacacttttcttgttttctttcatagaattttcctctcttctgtgcaatgaatgattgcctgaagtagaggattctaaagttatatttatcttaacacaagatagttttctatggaagtaactatcccttaaaatcagatatttaagaaacttactccatcacataatcttcaaacaatattcatctttttggttttgtcatcggattatctgctcgaaaatctgaacttattgaataattaccgatttggttcatagatctttttgcaattcatcagaatgatgactgcgtggtattagattaacatgggaattctattattgcaagctgaattttttaatgctttggtattcgcagatgttgtgttgttgctctcactacgtacaatcagtaacgtaccttccgcgtcaatccgcaagtagaagaagtgccggaatatctaaagattattccagcacttcttctacttctttactgtacttacaatgctttgtccaaacacatcttatcgtaccttttatacattgttcatttttgctttataggcttagaccaccggtaagccaatgtaaagtaataactttttcaactttcaaacaatacgctcatatttccgttggttgataacctcctcacaaatccatttccctctaaaatacatatatcccatccgaccatagtaaacagattcgattttatttcaggctctttcatgatcttattgctgcatacaatcttgcataaatatctgtttaaaataaataatgccgccaacgcattaaacacattttttaaatttgcaagttttatattatcgttctcagctctattatgttttactttattataatccccccaccaggatggcttactattaggtgtccatccatcaaatggcttataactttctttgttataactgaactgtactgttgcatctgtcagattatcatatccgcagagaatattagcataatctgttatacatgatcttgcttttgttggatcaacttcattacaaagtgctttaaaaactatatcaagttctgaacctatagatattaattgtttcgcatattcctttgaatatgtacttaaattgtcatctgtaaattcaacataattgaaagttttactaaaatcattctcaagctgcatatagaacatccaatactttaaattaaattcatcttttgtcatttctccacctcattttcaatctgatatcgtgttattatatacaataatatcctttgcaatttctgataatgtctcttctcttaatttctcatcttctattttattagctattgaattagcaagcagtaaattattactttctgcaaattttgcatgaaatttaactgctgcctctacattatgtgtatacattctaataaaaacagctccaacaaaattaattagtattccacttatattcccaactgttagcaatgttttatctgcatctgtatacacatacataaccagactgactactacaatcactattccaaatataatcatcataattcctaagcctgaaagaaatttggtttgagctaaattcatatcgtaatatctcatcagttctttttgattcattttaaacattttttcggctcgtaatgctcgcttattgaaatcaatctctgcaaattctttttcttctttttgggtctcttcttctaatttttctatttttttcgctgttttccaatcaaaaaaacaactcgttgcaaccaaaaggcaaaaaattgctagtaaaattaatatccaaaaagaaatttgtactattactccttctaataatctgtgtaagataatagcaataagccccaaaataatagcacatacaatactgccctgaaatccgttcattgctttctttgactcactatgttgaattagtttttcatctggggattctatcttttcttggctcatctctttattttccattagtgtttaatcctttccaatatgttcttttactttttcgacttatttcactgatttcataatctaaagttctccaatcttcacacaatctcaaatattcatccacaacgtcatgaatagcaaagatcagggcttttacattatccccttcataggagatcaaagaacgaattccaagtcccttgccaaaaaacatttcatcttcttcagaaaattccacgtttccgagatatcccttatatcccataaattagattataactcaaactctttcaacagcttttcctgatattccttatcaactgccgctttcaatatatcttctgtacgcccacgctttgacaattcaacatttaaccgattaattctgctttctccttctgctctgccctctgttcgtccttctgttattccaatcttacgaccagcttcaattcctcgtctttctgcggttaacattcctatattgtaatccctgattgccctttgtcttgtctcgtattctaacctcttcttttcatctgcgcttaatttatccaatacgtcatatgcttcttccaattcagaatttttctttgccatttcttcaaaatcctttctggtttttcctccaagaaagcgcatccactgcaacagacttgtctcattcttctcttccggcggaagtttcgacaattctaagatatgcatctccataagatctgtatactcttttcctgtcttcgtatcacaaaatgcaattcttcgatagcactctttatcatctcggaaatgatcatatgcaagaatactcacatggatacacttctttaagcaatcgtatccttcaccttctttgatctcacctgcatacatcttactcagataataaacagaacggtttgcccagcaatcaaatgcttctacctgcatctcaaaatcgatctgttctccgtccttcagtttcacccggacatctaagattccatacttatcatctttcgattcttttctgagaatcgtaggcataagttctgtcttctctatctcactggacggaacatttaatagtgctgcaataatgttcttgcgaatgttatcattctgcattaattccttaaagcagaaatctaccgttggaagcatgataaaatcttcctgcttctctttcgatgctttacaatgtgatgatgctctcttagttgatacacttttcttgttttctttcatagaattctcctctcttctgtgcaatgaatgattgcctgaagaagaggcttctaaagttatatttatcttaacacaagatagttttctatggaagtaactatcccttaaaatcagatatttgagaaacaataacgcgaaactcactccatcacataatcttcaaacaatattcatctttttggttttgtcatcggattatctgctcgaaaatctgagttttttgaataattaccgatttggttcatagatctttttacagttcatcagaatgatgactgcgtggtattagattagcatgagaattctattattgcaagctgaattttttaatgctctagtattcgcagatgttgtgttaatgttgtgaccagtagcataccttccgcgtcaatccgcaagtagaagaagtgccggaatatctaaggactattccagcacttcttctacttctttactgtacttacaatgctttgtctaaatacatcttatcgtacattaataaaacttttatacattattcatttttgctttatggggtctgaccaccagtatgtcaatgctttatcgaacaattagcttaatggcattgaccggtacctcattgttagtgacaaggagcacgcaccaatagcacctcagagagggcacaaacttatttaccaaatgcaaacataaaatgtctttcacagatttttcctactgctaaaacaattagcactgctaccacaaaaacaatccagcccaaaatttccattggcagtggtaataatcggacaagaatacctcgcgttccctgtactatcgaaaaatgaaccacatagacaatgattgaattttttccacactactgtaaaaaggcattttcatgcatcaacttggccatatcacttaaaacataatatcctatgaatgccgttaccaaactaatcagtacattaccataactattttcatacatcaaaacaggtttattgtacagcgacaatactgttataagcgcacagctgacaagcagtagaacaatgttgcccttccctgtaatcttttcacctatttgcttatccttaagaatccttcccgctttatgtatcaagttccctgcaagataatacccaaatgcaactggagtcacagcaatatataatgggccagacactccctgtggaacaacaatggtataaattatacaaacaccaagcaagataccttctgcttcaattaagtaatttttacatatacgggttagcacttcccaagcaatgaccacttgtgccatcacaagtaaaaaccaccatctgaaaaagcaataaaaaatgctaagttcctcagctgtagctgtatgcaacactagctttccaataaagaaattatacaaaagtgataagattgccaatgtaagctgcggtattaatagtcttttgatttttttctttattacagcaccaaaatttcctgtaattttttcgtgagccaaatagccaaacaatatgaaaaaaactggcatatgaaatgacaatataatttttgcaaaaaaattatcacttgttccaagggcgtgctctaaaaccacaagaagaattgctactcctcgaataatatcaacttgtttgtttctctccatcctcttctccctgtttattacctatgtataatctgttttaacttgttttttgcccatgcaaattcttctgtctttctcatgaaaatcagttcaactaaaagtaccgtcaaaccactaatcacaatgcgcacgataagacccataaacgattctgatacaaaagagcagagcatatatgaaaaaatcacgatcaggacattgctcccaatgattccagcctgctgtttgatataatccaccaaaggtcttttaaattttttcttaaacagaatgtacggttcccaccatacaattgtcagaactcttgcgattgctgtcgctccaagaattcctgccattccaaaaggcttagctaatactacggacaatagaatattaagaatcgcattaatcaccattgcatttttgcgttctttaaaaagacccattgtttcgcagaacatccatgttggatcaaacgcatgtgtaacataaaaagtcgcaagtattgcaatcagcacatcttttcccaaaacatattcactaccaacccaaattggtataaaaccttggattgcattaagaacacagactgagcaaaaaattgttataacgccaaataagtaaaccatacccttaaacacactatatgagtgttccgagtcgttatccgcattcagattgccaagacttgcaatcaaaccagttatcatcaaattaataaaagtggcaatgtagttgataatcatgctgtagttagaataaaacccaacatatatcgttccaagtagcatcgaaatcagaatattatctgtacttgttactacaacatttgaaactttataaacaaacatagacttcacatcgctgatcaaaccttttttgtctataagattcgtttcttttgtatactcctttaaaaagggataatatttattcgctattacattgcagacaacgttctgcataactgtaaaaaagatttggatgattaaatatgtcgtataattattgttaacatataaaaaggcaatctgtaatacatactgaagtaacaagcagattgtcgctacaatgtttctgatatactctttttggtctgctcgaagcaacgtcaccttaaacattacaaaataagataccactgaattacacagaaacaataaatagtacagaacaactttattgtgaggtagtgtacttttaaccagttgccctaaaaacggaacgatggctaaaccaaccactgtcaccgctgcagctatatagcgatataattttcgataataacttatgagttgctttaatttttcatggtcattatcatgtaaaacaccatataaactatacgttaaaacatttcctattcccagttccgctaaggacaatagtgtaagaatatttgtataaaggccgtttacacccgtgtactcagcccctaattttcttacaaatattgtccttgtcacaaaagctaaaacaagtgttattagctgctgtgcaaaaccaaatgaaacatttctaacggaatttgcacttctagactttcccattcttttttcctcgtacacttaatccaatcaatggcatgatccaaagattgtgcaacatcgttgctacaatatctgattttctcagttcccaccatattgatgcaaacaaaataacatgtaacacatagaaatatgccaactgattgcttatcgatgggtttctttttgcttttctatatattctcacggaaattcccgcaataatcgctgtaacaaaaaccacaccaaaatatccgaaatcctgcataaaataataataccaagtcggatatgcattcattctctggtgagcaccaacgacataaaattctgctgcgtatgtctgtgcattaaaaaaactggattaatacgcttaaatgacacaatctgaattatacaactaaaacaactgagcaatccgctaaatattgattgtccccaatgccaaacggatattcctgatgccaccggatctttcatcattacttgcaaaagagccggtccacagcagaaatagcctgcaactacattaaggatagatgcaaaaatcgttcctgaaagtttgtgtctctgtatcgttacaccaccaagcacaactattgctacaataataagaaatttaattcttcttattttattttgtttttttactgacaatccggaatcttctggagacttattcaaacagtatgcactaatcattgcaagtgcaaagtaaaatacttcccatctgccgaccgttacaacaataactagaataagatcaataatgctagcaactagatgccatccttttatttttccctttgcccacaaaaaaacttgaatgaacgaacaggtctgcatcgccgggaaaattcccaagtgtaaaaagaggattctttcggccgctgtcatatagccctcctccacactatttgcgataatatttctcattacagacattccataattttgcacataagataatcctctgagaaaaagcgggatacttattaacgtcaagaccagttgaatcattaacagacgatttcccacttttctataatctatttcatcatcctcatactcttcagtgtatgtatttacatatattgaagatttgttaattgttccatacccaattagcagcccaccaaaatcaaatgaaatcaatcctacaagcaatactgtataaacatcgttccctaatggataccattccatagtattgatctgcaatactatagtcaaaataagccacaaggcattatataaaaagattggatgaagtgccgaatggtacttggcatagcttgcataacaaccacaaaatgcaaaaagtataataataaatgcaattattgacacctttatctcccttccaatatactttcgaataattcaacgtactctttgtacctttcatcgcgcgaatatttcatcgacctatttctgcacttttctttgctaaatgtcccatctttttttactttgaaaattgcttgctttagttcatcatagttatctttttcaacaactacacccgtttcctggtcgattatttccggacttcctccagttctataagtaataacgcccgttccacaagctaatgcctcaatattagttgtaggaaagttctcttcacgagttggattcacaaaaacatctgctaccgaataaatttctgcaagttctttttgattattagtacgtgttatagatattatcgtctcgggcaacttgtttttttccctctcatcaattccaacaatgactatctgatattcctctggcaaatcctctgctaatttcacaaacacatctaatcctttacgaggtgcccatgaacttgcgactcctagaattatgaatttattttctatttggtatttctttctgaagtctgattgaataggtctgaatgtatccaaatctattccattattaatcactctcactggatattctgccaaaaaagattttttcacttcattgccaagccattctgaaggaggaaccaacgtaatatttgcgccggtaaaccactgtttcttcttctcaaacatctccttactgcggtcaacatcgctatatggatatttagcagtctgtggacaatcataacaacccgtcatccatttattacagtgaacaaaatcataatatggacagtgtcctgtatatgcccagcagtcatgcaatgtccacacaaccggtatatttttctttttcacataatcaaaaagcattggcaaattgatatagcaattatgcaaattgtgaaaatgaataagatccggctgaagcttatctatttttttcaaaaactgcgcagttgtaaaatgcgaaaagcagccattatatcctgttttctttgcaagtaataaatgaatttttttgtcaagtttacttcctatgtatatatgatttttcgattcaatccttttttcattgccatgaactgctgagcatgtataaaccgtaaatccatgttttctagcagtttctgcaatcataaacatgatacggccagtgctcccaactgtactactgtttatttccactatgcacttgaccatagttatttcctcctgtttttagcaatgttgaaggctatttatataagttgcacggacattttcatagccatatttttcacacagcttcttattattctttttaattgcatcaatttttccagcagtaactttagccaagtcaatttgctgtaactcatctattgaatcatattctatcccggcaattcccagctgtcgcaacaaaaatttaggtccaattactatgttaccaagaaaaatcgattccaacactacaccactactccggttagaatagctttcttctctatatggcaaaagtacaaatctatgcttagcaagttctctatagtatgcatcatcatccaaacgtatattttcaattctgatgtttttatgtgcttttgtcacaacttccttataagtactttgacttgcgaactttccacagattattaaggcttctccatttgcattaaaggcttctattgcgcctataatatctttaccctcattgatttctccgcaaatataaacatccttttgtttttctttcacaaagtacttgtcatactttcttttatcaaaccaataatctggaacatactgatgcttatctcttttcagttctacattcgtatgaaacacacaattaatttttttgactgcacaattgtaaataaagtttttcagatttttcttgctataaaagtccaaataatttgtagcaaaaattttctgtctttttttcttttttgaaaaaagcagtccgacataaagccaaaaatcagtattcacaaaccaaactgttgattcgttatttacaatattgcggacagcacgaatcttcttaatatataatcctattttcttaaatttactcgattgtctctgtggagaagattcatatggaagaacacttgcaatacagctatcatcaaaaaactgagcatacggtggtgttacaaccatacttacatcgtagctatcagataacatttcctttgtttcttttaacgtcttagctgtatgtcctgtcacctcaccttttgaatcgcaatatcctatataatccacaagtgttatcctattcatttttattttctcctatcactttataattcactttaaaaatttaatatcatcaactttctataaacatttttatatttcaaaaattgttctgtagcccgtattttttgctttactattacttacatctattgcatactgatgtgctttttctacggcattttgaaattcttcctgcttcataaccgcatatttctcaactgcatttacgaaagcactcttattttctaaagaaaaaacataccctacaccttgtgattcaaaatctcgccatggagtttgatcgcttataatacacggacaccctgctgaaagagcctcctggataacgtgtccaaaattctcacccaatgttggaaaaagaaaaacatgataatgttttaatgtttctacaacgctttctgagtcaagatttcccttccactcccattttacattgcttgggagttttcttagttcttgcttacactctttccaatattcttcggtatgtgctggtccatatatcgtaaattcgatatccgattttgtttcctccaaaatttcaattgcatattttaaattctttttaggcgcaattcgtgaaatccatacaacttttaaatttccagcttttttttccttcttaacatttgcttcatcaacttttcgaggtaaatcctctgcaataaaaaactgcttatcagttgcctttacttgctgccttcgcaatcgaataatcatgtgttagcattaccacatccttacttatagtaacgccccccccgatatgtatcatagaataatttgccccatcaaaatatgctgatggagctatatactcttgtccaccaccacgtaattccgtacaaatatcaatttccctcatctttaaatatttagggtaatttttttgataaaatgaacccggaattttttctgtcatcttaatcaaatttcctaataatgttaaaaaaacttttttaagaaacatttccttcatcctcttttttcattaaaataaatactataataaaaagtaacaagccattattaaagtagtgtccatatcttaataatctaaggaagaaataagtaatacacatatttccaactatagattcaaaagttccatctcgttttggccaaaatctaaacaaaaagcctacaactccggccagccccaaaagcccaagttctgagataatccttagtaaaagcgaatttgcatcttccttattaaaaaagaacactacatttgaaactggaagatctttaataaatctctcatacgaaattgggtgagaaccgattcctccacctaaaccacatgaatcagcaaaactttttagtgctatttttaaatttataattattgtttggctgcttatatttgctgtggccaagctttgtgaatcatctgaaatcaaagccaatgtatcattaattcgctcattaaaatccccaattttggtatatgcaatcataaaggctgcaatacccaaaataaaaattataatctgttttggattatgcttatattctaaccaaataaaaatcacgccaataaatattccaatatatcctgccgatgagaaagttgccacataacccaataaaataataatcgcttcttttttagaaataaaaagagccaattcttgttttgatttgccccaaaatagatagatcgccataaatgccattggcagtaaaatcaatgcacattctgatggttcttgaaatatagttgatgctctaaaaactgaattcgcaggcgcaagttgtccttttaccaaccatctcaaatcataaatcacactaatatgtgcataaaaagccacctgttggattaaggcaaatacagctattataattgcaaattttttatacaccaaaagaacgtctagggcatcatccttattcttaactatcgttttataaaaaaggtaactaacaattatacctgccaattgttttaccgctaaaaatattgtatctcttcctaaaagcacacaaattcctgtatgcaatacaagaatcaacaataacgctataaagctttggctaattctcacttttctggctgcaaatagcaacaacactatttgtattgccataatatattccggttgtattattccacataaaaacacaagaagcacacttataaccaatagtgttggcttcactacactaaactgagttgtttttttcatttaccgcattccttatttacaattctgctatatagatccaaatatttttgatactggaagtctttctcatatctttttgcgttatcaacgattttttctttgattaagggattgccactcatttcctgaatcactttccatacttgcttaatattgtttgcctcaacaattcttccgctatcctcacttacaacttccggcaacgcagtgcaattatagacaactgctggtgttccacaagccatcgcctccactgttggaagaccaaatgtttcctcaatgcttgcattgaataagacatctgcagcagagtaaaattccaccagttcattgacatcttttgttctagataaaccaattatattattcgggagtttttttatctgttgtttactcaatccgaccaggacaatcacataatcagatgttatcaacttgttcaattcaataaaatctttcaagcctttgttaattgaccatgtacttgctactccgagaattattttgcgatttttaattcctaacttttcttttatatttgattttgtcggtttaaaaatcgaagtatctataccgttatatattgtttcaattggatactgactcaagtaggactgtctagttatatcttccaaccattttgataccgtaactatatgcatatcctttacatcagtaaataactgcttctttctcaagtagttactttcgctacgatcaacataactagctggatacgaatgcctctgcggacagtcatggcattgagttttccatctatcacactttatcgctgaaaaatggcaacaatgtcccgtaaaagcccagcaatcgtgtaatgtccagaccaccggcttaccacttgattttaaatagttaaataatatttctacattaatatagtaaccgtgtaaattatgtaaatgaatcacatccgggtcatatcgtttgatttgctctattaattttatagttgcacttttagaaaagaatcctgccctatcagtaattcgcgtaagtagtgcatctatatacacattttgctttgttccaataacatagtgtggaataccggcagaaatagtatttctcgcatatgctacaagtccctgatggccattatttttcagcacattatacaagtcgactgcaatccgacccgtacttaaatttccaaatatattaatttggagaaccttcatatttttcaccatattctgaattttccatctttaattcagccttctatcatatctatcttttctctcatactttggacaacattattttgccttaatttacagtttcttaataactctcgccgggtttcccgcaatcacgcagttatcctcaaacttcccagcaaccacagcaccggcaccgaccacacatccatcacccagcactgtgcccttcaggatgatactattgcacccgatgaagcaattcttgccgattttaatctctcggctcggaaccaggtcactgtcgccaccgttttcatctcgcagcagtttgtttcttgcctctgcctcgatgggatgaaagtcattatccagaatcttgcagttaccaccgatgcaggtgttctcaccaattgtgattttcttccgggcgtaaattgttgctccacttatccctacgttatcgccaatctcaatcgctgctcccggagcacgggtcacgataattgtccggctgtaaagaccaaccaggttactgagaaagctactcttgattgtgacgttctcaccaatcttcagcttggcgccgcccttgttgaagatgatcggcactcccttcagcaagaggttctttccatattcaacttttgtcatcttcataaccagcttaaaccaattactgttcatacctcttgcctcctttacagcttcagaatttcttctgcgtactttctcaccgacacatttctggtcaggttcttttccaaattctcacggcctctagctcccatcgacttcaactcactatttccagcgttatcaatgaaccatcggatgttttcctcaaccttgtcatactcacctggctcacaacagagcccaccgtgtgtatcttcaatcaggcagcgaacctcggagcctgcctccaggacccctaaaattggcttcgaagcggccattatgccgtatgccttcgatggacaactcactcctttaatccctttcgcgttcacacaccagtgaacatcaccagcgttcaggctataaatcaggtcagccttatcctgatacgggatgaaaaccacattgtccatatgacgctctttcacatacagcaccagcttatccagcacagaaccggcaccaacaaaagcaaacacaacctctctgccatccgcagtcttagtacccggcttgattctctccacaaccttcatcagattctctaggtcatagtacagtccaacattgcctgaatacataatgatgaacttaccatccaaaccgtacttcttcttgaaagcaacaactctttcattgttctcatccagcggatagatttcattctcatcgatccagttgttgatcatgacagtcttagggaccttctttcctttgaaacgattctccaccgtctccaccagatcacgaccaaccgtgattatcaagtcactacgcttgcaactgaacttgtcaaaccacatcatggcatcagtaacaaacttgctcttggtataaccaacagccagcacctgctccgggttaaaatcctgaatgttataaatgtacttggcgtgcttcacccacttaccccaaacacccagcagacctccaagaatcggaggctgagaaatggagaacacataatccatttttccaaccttgaaagttgcccccattgccccaaagaaataggaaacaatattcttcacacggctctttttattggccttactgaactccggcactcgaattcgcagaaccttcacgccattgatttcttcttcgtaatatttctgtgtcttatatttatcctcaattgtccctaagtaactcggcaccacgcaaatgatcgtgatgttgaacttatccagcataccctccgccagttcacggagaatctgccccgttgacgcagtatccggaatatagtaatgagcataaatcagaagatttttcttatttgacattcctataatttcctcttgctttttctcgtatagctatacgttcaatccctcaaaaaaagaaaaacatctcaccaagctccattccactcccaagcacccctgtcttccctctccgctcatttctccctatagctatacgttcaataccaataacacctgcagtttcccctcccggttccactgcagatcatcattcattctacttcatctcttccatccattccatcacttggatccgctgcccttaagcacgaccccgacggtcttgaacagaattttaatatccattccgatattccagttcttgacatattccatatcaagctttacaacttcctcaaagtcagtgatatcacttcttccgctcacctgccacattccggtcagtcccggcttcacggcaagtcttccgcggtgatatggctcatactgtttccactcatctactgttggtggacgggttcctacgagactcatatctcctttgagtacattccagaactgcgggaattcatccagagatgtcttacggataaaccagccaagtccatgcttgcttccatccgctccgcttccgatgattcttgggtcattctccattttgaacatgagccctttcatctcgttctgtttcatcagttccttcttgcgttcctctgcatccatatacatgcttcggaatttatagattttaaataattttccgttttttcctactctcatctgagagaagaagattggccccggtgaagcaatatagattgccggagcaagaaatattgtaatgatacctgtcagaatcattccaacgattccgccacagatgtccatcgttctcttcatcatagcctgtcgtgaggaaatcactctgacgctggaagtcaggactgtatatccacccatacggttaataaactgatttcctgtccatcctgttctgtcatccagacattcgtgaactgtaattcccatgttcacgcatgtttcaaacaaatcttccggtatcaatgttttcttcttaattccaacaagaagagcatcaacccatcttgtctgtatgtattcagttactgtatcaatcttacttacaaccggaattccttcgatcaattcattttcttccggttcgcggtctgcaagtacgattccgacaatatcgaattcattaaatacattctgttccacctgtcttaacatggaatctatttcatcacttgtcgaaacaaggagcatatttatttttgaatagagcatattgccatgtttcagtaaatatttcttccatatgattcgcaccacataaaccaaaataactgacattggaataaatgatgtaatcacaagacgtgaggtcatgcttccctgtttactcataaagagatatacgattacaagcgcactcacgataaacacatgctttaatacattcttaaactctacaaagtatcctcttctcatgattccatgatatggctctgtaaagaaagcagtgcaaatgtctaccagtgcgatgaaaatcccgatattcagatataatccgttatgatacagattatccattcccatacgcaatacaaaactgcttacataagccagctgtaatgcgacaagatctaatatgatgaaatcccagtgcttcaaccaactattactgttcttcctgtacattctcctcgtacacccttttcccctgatagtcttctgtctgactacataacaaaacatctgattttattcatcttaaatgttttgtctgtaattcccctgtaaaatggaatatgcagcggatattctccactgcatatccgactattcctgtttgcttttaccatagtagtatgaattatacttactataatatttctctttcttcatatccactttattcaatactgcaccgagaagcttacatccactcttcataagctgatcttttgctttcatagcatctcttctgcttactgcttcgctctcgattacgaggattgcaccatcacactgttttgctacgattgctgcatcactcatattgatgatcggtggtgtatcgattaaaacataatcataggcttttctcgtctcttcaatcagtctgctgaaacgtccctgctccaaaagctctgatgggttcggagcgtacggaccggaaaatataatctcaagattacggtaatttgtagaataaatcacttcctccaaagcaacctgtccacttaaatactgtgacagtccattggtcttctgcttgatctggtaacgtttgatataactggatttacggatatctgcatctataatcagaactctctttcccatctttccaatctctactgcaagctggaaagccacgtcactttttccttcattcggataacagcttgtgataacaatactctttgtctcgacaccgctgaactgcatatttgtacggagggttttaatagcctcttcatagaagacgtcttcttttctggagtccgtcatcataactctctgaattgccatttattttttcctcctttttttcttctttttctttgatgctgccttgcttgaattgcgagatccttttcctgtaatgtagtcttttctatctggaatacttgccagtgttgtcagaccaaggtagttctcgatatcttcctctgacttgattgtatcatccatcagtgtgagaaggataataatacctgcggaaagaaccagaccagccagtgctccgatcagcacattcttctttgtactcggacttgtctggattgtcggcacttcaccttcttcaataatcttcggcggtgttacttccatcttgtctccgataaagtcagctgatgtctttgccagcgtgtcagcaatcttctttgccatctctggatctttgtctactgctgtaacggaaagaatacgtgtatcacttggattctctacggtgatacattccttcaactctttatatgtcatatccagatttagttcatctactacgtcctgcaataccgtacggcttgtgatcaggatattgtagtctttcgtcaactgagtaccgatctgcagatcagccagtgaagaaagtgtggtttcctttgtgagaacaagcatcgtagatgttgcgctgtaaacaggtgtcatcaaaagctttgttgctgctccggcaatcactgctccggccaatatagccgcaagaattaccagaatgtgctttttcaatgcgtagaatagttctctgaggtcaatctcgacctcgtcgtcatcatgcgtatttcccatctttactcccctttattttattattttgccttctgcaatgcgaagtgcattctcttttgttatctgtctgaggtaagtactgtctaaatgcttcctcatccagctcattgcctcttttgtatcaggcattctgttcccgatattgtgcatatcggttcccatgaaatggatattcttttttttcagattatccttacaccagcgtgctgtcgaatccttccagtcaccgctgacggatctgtaattcatctggatcaatgcttccaggtcaatcagttcttctacacgcttaccttttctaagacagcgataccgctctgcatgagcaactaccggagcataccctgctcttgacagattcctcactgctgtacatatctcagaatacggtactgaaggcataaactcaaccaatacataattactgtctgccaacgtaagcagttttccctcttcaagcagacgtataacactattagaataaaaaatctcctgtcctgtccagattcgaattggctgtcttcgctttatctttccatccggacctttcaccggacggtttgcgcgactcatcagctcatcccgaagccgtctcaacttctccggatctctgtttggaaacgctttggaataatgtgaagttgcaaacacatctgtgattccctgtcttcttgccatagaaagcatatgaagactttctttcatcgaagacgctccatcatcaactccaggcaagatatggctatgtatatcaatcatctttaactcgtccttttacataatgaaagagacacctgagataaaaaatctgtcctgccgtgcctccttgtatcgtcttatcttattgcctttaacacccaattaatgatattttatttttcttttactgtcaagttattttcatgcatatttttatgaaccttataacattattgtgatttcttgtttatttcttcatttttggttcaaaaatcaatgaagccaggtatccgaaaatcagtgctgcactgatcccggctgcacttgccttgaatccccccaggaaaattcctaggaatccatttttatcaacagcttccttcacacctttccacaggacatttccgaatccaagaagtggaacgcttgcacctgctcctgcaaatttcacaaatggttcgtataccccgataaatccaagcactgcgcctgtacagacgagtaataccataacacgtcccggcatcagctttgttctgtccagaagaatctgcactgcagcacagatgagacctccgattaaaaatgcttttatataatccatttttctattccttttctgtttttttaacacatacttagcgtcttttttacttcttcctattataataagattttcaacagtgctcgatcataattgcgtgtgcaatccccggcacacttgctccttcattgaagctgaccgttgacatcaatgcaccggttggcacaaagagtatctttttccattctccgttctcaacctttggcagaatataagaagccagtgttgacgctgcgcatccacagccgcttccgccggcatgtgtatcctgtgtctcctgatcaaagatagtcattccacaatccatatgcttttttctgatgtcatatcctctgcttttcatcaggtcaaaaagtatagactgaccaatgtatccaagatcacctgttatgatctgatcgtaattctcctgagttcgtccaagatcctggaaattgcggtagatggtatcggttgcagccggagccatacatgcccccatattctgtgaatctttcaatccaaagtccacgatcttccctatcgtaacgccggtgatccgaatatgccggaactgggattttctttgatgttgattatcggaatgtattttattcagatggcttcctacaaggaaagccccgctggctgtcacggtccagtgtgcagaaagtggtctctggttcgcatatcctaacggaaatcgaaattctttctctgcacttccgaaatggctggatgttactgccaacatgtaatctccgtatcctgctgccacactcattgctgctaatgccagtgcttctcctgatgtggaacatgcgccatacaggccgaatatgggaatctgcagatcttcaacgcccatagaagttgcaatcccttgtctgagaagatctccaccaaagagataacgcacagacttcggatccacatgcgactttccaagtgccagtacacaggcttccttctgcatgttgctttcggcttcctcccaggtctctgctccaaacaggtcatcctcatttgtcagatcaaagcattttccaagtggcccctgcgcttctttgcttccagcaactgatgctgcgcttagaagataaggcgcttttgtgaatacaatgctctgtgctccacgaagctgggacagatgaaaaggaccactctctgattcaactgcccggtttttgtttcccgtatcattcatatcgtttcctcatttctgatgtttcattatttatttttaaggatattattttcatttttgtgaaaaactatgtgtagaatttaaaaacaaaaaagaagggattttcatttatggacaaaatagaacaattgaagcaacagaagcaatacgaagcctatgtcaaaaagaaaacaccacagcacaatgtgtggttcaacatgatgaaggcgttcttccttggtggaatgatctgcctgattggacaatgtatttatcatttctgtgaattgaaaaaactttccccggatgactgcagcagctggacttctattctgctcattctcctgagtatccttctcaccggtaccggaatttatccactgcttgccaaatggggcggtgccggtgcacttgttccgattaccggctttgccaactctgttgctgcacctgcgattgaatataagaaggaggggcaggtttttggtattggttgtaagatcttcacgattgccgggcctgtgatcttgtatggaattgtgacaagttgggcgcttggagttgtatattgggtatggacgttgatgtgaaacaagaaatgtgttagataaatgtataaggaagccgttactcacggcttcctaatctttctttaaaatctgtataatcaaatgcggttagctgctgcatggttctgtcagcatgtctgatccagatatccggtaatggcatcccgttaaatgtattatttttgcaagtcgtataaatcgccatatctccaaacagaaggagatctccgtattccggtagtttgctgaatttatagtctccaatgatatcccctgacaggcaggttggacctcctaaccggactgtaatcctgctatctgttgtctcatccgatgctccaagaagcggtggacgataaggcatttccagtacatccggcatatggcaggcggcgctggcatctatgatcgcgatctgtgtgtctccatttttcagaatatccagcacactggtaagaagaaatcctgcattcagtgcccaggcttctcccggttccagataaacctctaccttccattcttcctgtgccatttgaatgcatcgctctagtcgctcaatatcatatcctggtcttgtaatatgatgaccaccgccaaaattgatccatttcactttggcaatcaaatcaccgaactgtttctttacggaagcaagggttgtctccagatcatccgagtcctgctcacagagggtatggaaatgaaccccatccaaaagtttcatcaactccggattcttcacaattgcttcatcccactgtactcttgttgtacccatgcggcttcccggtgcacaagggtcataaatctcatgtccctcctgggtagagcattccggattgatcctgagtcccacgctttttcctgcctctttcgccattcttccaaagcgaagaagctgggacggagaattaaatacaatatgatcggcatactgaagaagttcctcgaattcatccgcccggtaacccgcacagaatacatgaacttcttttcccggcatttcctctgcccctagtcttgcctcatacaatccgctggcctctgtacccgccagatacggttcaaaaaaaggataacaatcataattactgaatgctttctgtgccagaagcatcttacatcctgtccgttctgctacttcaccgagcagttttgcgttttctgtaagtgctttttcatccagtatatagcaaggtgttttgatgttctgaaattccggcggaataattccgccggtggctgtaaatggtgctcttttatctaatcttttcatcagtctaccaacttcggatcatgattttcactgcgcggcagaccataacggtcaagtgcatccaggaacggatccggatcaaattcttctacagtatatacacccggtctgatccattttccagtcagcatcatcaatgctccgcacattgccggaacacctgttgtataactgattgcctggcttccaacctcatggtagcattcctgatgatcgcatacgttatagatatagtaagtcttctcttttccatcttttacaccggtaaaaatacagccgatatttgtttttccttttgtgcgtggaccaagacttgccggatccggaagaagttctttcaggaactggatcggaacgatttcctgtccattgtactggatcggtgttgtagaaagcattcctacatcctcaagacaacgcatatgatctaaatagctttgtccaaaagtcataaagaaacgaatacgtttcacacctggaattgtttttgcaagagactctatttcctcatggtgaagcagatacatgtccttgtctccgacctgatcaaagttgtattctctcttaatatccatcggcgggatttctacccaatgtccgttttcccagtaacttcccggtgcacttacttcacgaagattgatttccggattaaagtttgtcgcaaatgcatagccatgatcaccgccattgcaatccagaatgtcaatggtatcaatctgatcaaattcatgttttaatgcatatgcacaatatgcctgtgtgacacccgggtcaaatccgcatccaagcagtgctgtaagacctgcatcttcaaattttttgcggtatgcccactgccaggaataatcaaaatatgctgaaaatccttcttctttacagcgtttttcgtaaattgcacgccacttcggatcatccgtatcttccggctcgtagtttgctgtatccatatagtttacgccacatgccaggcatgcatccataatcgtcagatcctgatatggaagcgcaatgttcattaccagatccggtttgtaatcattgatcagttcgatcagctgatccacatcgtctgcatcaaccttggctgtcgtaagaactgtttttgtctttcctttcagcttttctgcaagtgcatcacatttttcctttgtacggcttgcgatacaaagttctgtgaagacctcatctgcctgacaacatttctgaattgctacactggctactcctccgcagccgattacaagtactctgctcataactcttctccttttcttcaacagttgtatatttataattgctctcttataagttgccggtttattttgcaattgcaagaagcagttcacgaagaaccttacatgctgttgcggttgagacaccacttgcatccagcataggagcaagttcattcacatccgctcctactacatttgcctgtgcaactgtacggatggcttcaagaagctctaagaaagttactccccccgcctccggagtccctgttcccggaaatactgccggatccagacaatccagatcaattgtaaaataaattggtacatttttctctttcagttctcttacagtctcttccagtccgtcaaaagaaagtggatggaaatctgtatgccgcgcggcaaatctaaattcttctctctctccgcttcggatacagaactgatgaatacgtccgtctcccagaagatcatggcatcttcgcagaacgcatgcatgactcaatctggctctcagataatcatcccttaaatctgcatgtgcatcaaaatggatgatatgtagatccggatatttcgcagctacagcgcgtactgctgccagcgtcaccagatgttctcctcccagaagcaatggaaatttatctgctttcaatatttcttctgctctcttttgaatatccgaaagcgccatttcactgcttccaaagcaaagttccagatccccgctgtcaaatacactgatatccataaggtctctgtcctgatatggactgtaagtttcaagtccgaaactctcatgacgcatagctgccggaccgaatcttgcgcccggacgaaaacttgtcgtcgaatcaaacggcgcaccataaaggacaatcgatgcttcttcaaagctgctttcgcatccgataaaagtttctatattcggtaaaatcatgaattattcctccacttctttcagcatatcttccaaaaatgccggaaggtaaaatgctcctttatggagtcttgttgtatagtaacgtgtacgaagatttaatgcattccatgcttctgcgtccagatcatctacgggatgatattttttgctggcaaatccaaacaaccagtaacctgcggcaaaggttgggatatgcgcctgataaacacggctgatctgaaatgtactggcaattcttttatggcttcgctgcattgcatgtgcatcttctgcgtagaatggacttccctgctggttgaccataattccatcctctttcagcgcattgtaacaatttccatagaattcgcgggtaaacaatccttccgatgggccaaacggatccgaggaatccacgataatgagatcatatttcgcctcgcatcttcggataaaacggagtgcattttcgtaatgaagatgtactcttctgtcatccagtctgcatgcattttccggaaggtatgcacgacatgcttcgacaaccatcggatccatttctaccagatcaatgtgcctgaccctgtcgtatctggtcagttcacgaacgacaccgccatctccggctccaatcaccataatctcttttgcttctttatggatcgccatcggcacatgtgtgatcatctcgtcataaataaattcgtcacgttctgtcagcattacatttccgtccagagtcagaacacggccaaattccggtgtctcaaaaatatcaattctctgataatcactctgtctggaaaagagctgacggtttacccggatactatgtttcacatccggtgtatggaattctgaaaaccacatttccattgttattacctccctgtcagaacattcagtttcaaaatatccggatcttccggtccggtcatattacaacccttcgcttttgcatactcgatataatccagaatttctgctgtaatgcgttctccaggcgcaaggatcggaattccaggcggataacacatcacaaattcactacagaccataccttctgtttccctgagtggcagactgcacttatctgcataaaaagcatcctgtgggctggtcactacctgaggatcaatatattcctgactcagaagtcctgttccgtctgtctgaaaacgtctgcggatctctgcaagcgcactcacaagccgttctacttcctgtgcgcggtctccgatcgaaaggtaggcaagaatatttccgatatctccaaattcgatctgaatgtcgtattcgtcacgcagaatatcataaacttcaattcctgcgagtccgatatctaacgtatgtacacttaattttgtaatatcaaaatcaaaaacagaatttccatttaccagttcttttccaaatgcataataaccaccgattgcattgatttcttctctggcatattctgccatatctgctacctgatggaaaatctgacggccacgctgtgcaagattccttcttgaaatgtcaagactcgacatcagaagatagcttcctgatgttgtctgtgtcagattgatgatctgccgcacatacccggcatgtacgtccggacctgtaagaagcagactcgactgtgtaagactgcctccgcttttgtgcatggatacggacgccatatctgcgcctgcttccatagctgaaacaggaagcccgccaccgaaataaaaatgtgttccatgcgcttcgtctaccagacacatcattcctgcctcatgtgccatcttaacaattgctcgcagatcactgcatattccatagtaagtcggattatttactaacactgcaactgcctttggatgttcttttatcgcttttgctacctgttctctctgcattcccagggaaatcccaagccgctggtctacctccggatttacataaacagggattgcaccacataaaacaagtgcattcaacacactcctgtgaacattacgtggcaatatgatctcatctccacgtttgcaggcagtcagaaccattgtctgtacagaacttgtcgtgccccctaccattaaaaatgcatgtgctgctccaaaggcatctgctgccagttcttctgcttcccgtattacagataccggatggcagagattgtccagtggtttcatactgttgacatcgacgcctacacatttttgtccgagaaattctgtcagctccggatttcctcttccccgtttatgaccagggacatcaaatggcacaactctcattcgccgaaaagtctccagagcctcatggatcggtgcatgattctggtttaatttaaaacgactccctttcatatttcctctctttccaggttcctttgtcaaaacactttcttaatacagaaaaaacgcagataagggcgctaagccacaaacctgcgttcggtatgtattcgtctgttttattctcagctgtaacagaaaaggcaatatcttttcttagatttttaaataaaacttctggatcatgcgtgtcagagtctatatagcaattatacttttactactcttattgaccgtttcacaagtctgcgcgtctggcgcataaggctatcaaagaaacctacttataaaattagagcttttcactcaatcaataaggcaaccaaagttaccataatcggcagtggacccggctgtccgtatggccttaacctcgctgggtggtccgaaacaattgctttgaaaagactctgtctgttactctgcatcttcgtctctcaaaatcgactatagcataacatgttaaaaaaacactgtcaagaatttctcccatctattcgttactttcttgcagcaattcttgtattaaattaaggttcgaatcagaatgttccagttctcttgaataacgatacaccgtatctatcacatcatttatatctagcactttttcttgcttcatccactgtgccatcagaagttcatggatcaacagggtgctgacaacagccatctgtgctttcgcaagcgcttctccatcgtatactgcaccgcaaaaataggtactgatgaaatatacaaggagctgttcatattgtatttcatattccggcatttctttcgccatccagacatgaaattcttgtatcatctcaatataccgttttttgtctatttttttatttacatttctatataatagtttctctgcttcttgaagataagactcccaatccgctcttaaatattccatctgatactgattttgaaacatctttctattatatgtatagtaatccacttctgcaagagcatttttcacttcccgcacgccttcttcagcctgatagtaatcaaatacatcatccatcgagaatatatcttcttcgtcaatacattcctgcagatcacgtgcaatcgccagaataagagctgctcgcagattcagctttttctctctgtcctgtaaaatctcaatcatcacatctcttgcatctaacagtttcgaatataaaaacggatcaaaatcttcataatcttcttcctcatctgtttcataagtaagaaaatgtaccggttcttttttattcatcaggattctcgccacttccggacaggatacagaaagtgtaacctcccgcacatcttcaaattcttcgatatgtcttggatacaatttacaggttctgcacaggctctcttctcccagggcggtatacatatcacagaggtttgattgattcaggaaagcacatcttctgtctttatcctgcttgaatgttccttcttcccagttgacagattctttcaaacgctctgcaaatgtacctgtctcatttttatatttctctaatgcagcttcatctgcaacgatctgccatccggcacaacaagtgtcctcacattttcctgcaacacaggtaaattcatgataataatccgggattgtatataacattgatctacttttatccattcctttcgcttttatgatcgtctatagaatttccgacctgttttattatagcacgcacttttaagaaatggttataaaaaaacgtatcaaactgactggatttcaattatcactattgaatatccggtcgatttgatacgttttattattttcttagaaatttaattatttctttttctcatacaggaactcttctggaagtgttacattaaagtcatgtgccagttcgcggaagttctccggtgtgattgtctgaatctttcttggtgtcatagaaagaatcttcacaaggatctctgctgacttctctactgtatgcataagaccgaatgtaagatcgaagtcttctcctgaacagaacattccatgatgtgcccagatagcaacatcgtatttctccatcagttcagctgtcttctctgcgattgctcttccgcccggaaccatccagcctacaactccaactccgtccgggaatacgaccggacactctgttgctgactcccaaagttctcttgtaaatacctgatcatccaaaggaagaacgaatgtcagtgcgattgtatttgttgtatgtgcatggtagattacacgatgttttccgtttgtgattctcttcttcacttcatggttcatcagatgagttggaagctcacttgtcggtcttccaccttctaccagtccccaacggattctgtattttgttcctgtataatcaatctcgataattgcaagacatacttcaggatcaacgataatatttctgaaatactttccacttcctgttacaaggaagaattctcctgcaagtcccggaacctctgttccgatctctgtccattctcctgattcattcagacgtggtctgatcagctcaacctcttctggtttcagacgataacttaaattaccaccatttctctcatgccatccctgaaggaatccgtcatttgccattttaataaaatcctgtacaaacttcgcatctaaaatcttcatattattttactcctcctgtttttactcatttaccgcaatgttgttttatgtggtttatttcttctttactattgttttcttgtggtttctatttgtattatagatagttttatgtggtttgtaaacacttttttcaaaaaaaattgtacaatccgaaagacattaacataaatcaagcctatcatgctgtacttctactgacagtacttcgaaagtggctggaacaatgcgacaaacttaaagaaaaggaggagccgaccaaatgagtagcatgactttggcacaacagataattacaatcggaatgtgcatacttggaacaatggcaacgcgctatcttcctttccttatttttaaagaaaataaaaagacaccggaatatatccagtatcttggtaaatttcttccttctgctgttttcggaatgttagttatctattgtctgaaaaatgtagaagtactgcacggaactcatggaattccggaaggaatctccattcttgtcaccgcagtacttcatatatggaagaaaaatatgtttctatccattgcaggcggaactatctgttatatgttgatattatattttctataataatctctatagcaaaaaggtctgagaccacatgtgcttacacattagcggttgctgttctcacttcgtgcgaccagcaaccatttctaatctcataactcttctcataactcttacggcttgcatctgccacaaggctcatatccttctttaatcaaatccgacctacttcctgtatactcttctttgttctctgctttgatgtccttcacaccagaacaagttgatttatgaaacttttttgtattcctattcaatatataagtttcttttttggttgattttgatgttgttgacgaattggatacatttttatcagttacttcagcttctgttcctggagcccactcaccttccggcgttgcgagttcttccgtctgataactctctcctgtctcataattgatcacaacatatggctgtacattatatacgtatacgttaaatgttacccctgcgccatcatcttctacagacttcgcctccatctggactccggaagccaccaggtcatcgccgctatagattggagtgacacgatacatcacatgattatccgtttctttgacataatctgccacctcatcctcgaatggaagcataccatctacattcatatagcgtgttcctgttatcagattgcgctcattcgcattctcaccggtcagctgaaacccaatcagatgacagcggttgtacagatatccaccgtcaattccatcatattccttattcacccagcctgttggcttcacactactgatgctttctcttttctgtgtcggcatcaaatcttcacctacacaggcttccgctgtctgacatcttcccagttcatctaacgggctgtattcttcgtaagaatctgccgtcagctcatcttctgtaaatgttggctcattatcattgatctccacgtagggctgtcctgtatactccggtacttcttccagcgtatcaacggattctatctgccctgtcgatgcgaatgtcgtttctgttgtcgtttgatttccgcggtcagaatcctgattgcctgatccttgtgatatctgcagtgaaccgcaggatgtcaaaagaagacaaagggccgttatacatccacataatatggttttaaatttctttttgctcatattgcactcctttttcgaacatatgtacttgttaagtatacactattttttctaatataggaagtgctttgtgtggacaccagtaacaaaatgtcaatagttttttaatcacttttcaaaaaagggaaaaaatagaacgtatagttaatttccatacgctctatctcacatttcatattaaatttttgaattctacaaacttgaagttagcgatttctttttccggtattctctgtcccacggatttcctcatgatagaaataatctacgatcaccggatgcccctgcgggactctgccataaggcatttcattatccacaaaggcacaatcatacttcttagccattttctcagcttttacttcaagtgcttcaaagtagctgcggttatgcttgttatagatctcgtcgtaaagtggtacaagatcaggatattttccggcgatataatccataattgtctttttgaaaccgcctcgaagattgagattttcgagccagaacagatcgcactgatcctttacccgctcaaagattgcttcaaaattcgtgataccggggaataccggggatacgaaacagactgtacggatacctgcctcatatacctgcttcatagcagcgatacggtgctcaatgctcgaagcagaatccatatcgttcttgaaattttcatctagtgtgttgatcgaccatgaaacggttacacgtccaagcttcttcaacagatcaatatcccgtaccacaagatccgactttgtgcagatcagaatatctgcgtcactgccgatcagctgctccagaagttttctggtattcccgaattgctcctcctgtggattgtagccatctgtcacagaaccgatgaccacccgctgtccgacatatttcttcggatttttaatttccggccaatgcttcacatcaaggaaagttccccattcctccttgtgcccggtaaagcgcttcataaaagaagcatagcaatacttgcaggcatgtgtacagcccacatagggattgaccgagtaaccgcctaccggtagactagacttagtcatgatgttctttgtttccacctcacgaatgaggattccatttattacttcttccatgatttctgtacctctaacactttattaaattcttccggcatttcctgaatcatattttcatcccctatgatagggacaagatcttccttcataaacaccggaatgccgagcttatgtgcctggtccgtcagagaccatgcccattccggctccgtatgaatcttcctgctctgagctccggtcatggtgcccacaacgatccaattgattccggaaagatcaactgtaccgggatcatcgaataacggctcaaaggtaacatggtaatgttttgctctgacgtttttccgaagggcgtcgatacgccaccgttctgctttcctcgtcaccgtaacgccaaaccatgcgttttccagatcggtatcaaaatccagcaaatcaggtcgcttggtaaggaacaggaactgatgctgtggattttcacggatctttgcaaatacctcgtctctccattccggcttccatacagagagatcgctcatgccggtaagaagaaagttctgcggacgtttcttttccatcatcttgagcttacccggaaagaattcagggtcagcgaagtcatcaatcatatgccagcgtttcacgttgttgcgggcatagcaatatgtacaccccactgtgcagccaatgacgatattcatgttctgaatctgatctttgatacaaatactcatgacttctgccactcctcaagattctttctgatgcggtcgaggcattcctcaaaccggataatttcttcctctgaaaaacctttgtagtaaatactgcccatctcatcagatacagaatcgtactcgccctttaaggcatgtgctttctcagtcagaaacaggagcgttttccttttgtccgtttcagactgaacacggcttatcagcccttgattttccattctttccagcatcgtagtaagagatgttatcgctaatccgcatttagtcgagagtgacctgattgagataccatccttctgccacagcacataaagaatacgcccctgggctccattaaacgcatcaatattcttttcactgagaatcttctcgaaaatccggtctccaagctgttttatttttgtgacaagaaatcctccattcatttccatacaaaagctcctatatagtagtttattaaaaacatactatataggagctttattgtcaagagtttatatgtcttaataggtaaattccgttttttcaattctccaaactggaatttatataattattcctctaactttccccattttacaggcctttccgcctgtccattagtgaaatgatatgtagtttcccttatttttgcccttatgagataatcacaagggaaataagggaatttttttagtcattacctaccactttatcaagaagccgaaccgattttcgtttcgcatctcttgtggagtgagcatagacgttcattgtggtactgacatctgagtgtcccaacaattcctgcacatcttttggggcagctccatttgctaaaaggttgcttgtataggtgtgacgtaactggtggaaatgaaagccttcaaatccctctaatgtttttgccacctttctgcaaacagtccccaaagtagttggaagttccaaacaaccatccggtcttaaacagacgaaagaaatttctttataatctgtcgggacttcctctgttctgtctaaacaataatattcgtagtacactctgtttttctctttgacctctttgtagtagttcgtgtgataaagttcttcgtactgcattcgattttttaactgctctttccgggcattacggaaaatctctaccagtgtatctccaaaatcaacaacccttacttttttccgcttggttggtccgatgatatatttgcgctttgagccatcatatcggatgctgcgtcttatggtaaggcattgttcttccagatttacgtcctgccatgccaaaccacaggcttctccaatacgaagcccggcataataggctatctggattggaagtattgcggctgggttctttttttgcagataagcaagcagtctttcataatcttctcgtgaaattggttggacatttccgtccatatcctcatcagaaaacaaatccacttcatccgtctgataccgcagtttaatatactgcataggattgaacgtaatatactgctttggaaatactgcaaagcggaatgattgctgcatgactgcggaaaaagaatggatgtaatctttgctgtaaccctttctctcttttccatcgggatgaactcccccgaaggaaagcaaatcgaagaaagattgcaaatgttcagaggttacatttttcagtttacgttctgccaatgggtgtttcttaatatttcggattgttccgaggtaattctccaccgtaccattgctgagcgtacctgtttttaattcctcctctgcccacacatccaaaagctgtccgactgtgagattatccgctttggcaacaaatttctttttctcataatcatccattgcctgacggagcagtttttcagtttcacttttgctttctgttccaacgcattctttctgaacaagattgccgcttgcgtcctctacatagaagcggtagtaccatttctttcctttttttcttacagatccttttgccataatcgtatgtctcctttcgatattagacaatcggaactgatgaaatgcttcgtgcgtgtaagtatatcataactccggttgtcttactataccgattcggaatcttcgtataagacttctgataaaagatttgcaagcctttgttctgctgtttttggtttcttggaatagagccttacaatgtctgccatctcattaaaagcattgatggtatgagtgatttcccttaagaacataatctcattatattcctcattcgattcaaaccctattgttttggcaatatccgtctgaccagcatttcccttgaagtttttgcaggcgaactggaaggaatccaaaaacagaccatattgttttaacatcagcagtaataaatcttttgaaaaagcatcttcttctttggtaagggcaagcggtaactgttccagaatatctcccatcgcatcacgaatctgtaattctctcttatccgtaatgtcggtttcatattcatctgtttcccctttgagccattccacagatacatggagtgcttccgaaagaccttccagcaccatttttttcgtattgtcaatcgaaccattctcataacgcaggattgtagaagcggtaactcccatcttctctgcgacataaggctgtgtcagattcaattccagacggcgctgttttattctgctgcctatcagcttgcgtaattctttatctttcatgctgactgcctcctttttcggtatgtatgaattatagcattgtttttccgaaattgcaatatgcaacttaaaaattatttttaatatttcgtaacgcttgacaaaaagatatgaaaaggatatacttacatcacaagaattgcataatgcaatttataaggaggtgattatatgacgcaaagaaaaattgcattatccatcgaagaagctgccgactatacgggaatcggcagaaacaccttaagacagcttgtagaatggaagaaacttccggtattaaaggttggtcgtaaagtcctgattaaaaccgatattctggaaatgtttatggaagcgaatgaaggtcgtgatttgagggatagaggaaatgtaaaagccgtaacaagaactgcggcaaattaaaaaggcggcttcccaagaaaccgccaaaggttctatcagaccgaagccatgatatacctacacgcaagaagattataccatgtgcttcttctgatacgcaaccaagaacttatgtttgtgaaggaaaggagaatgtaagaatggcaaaatcaacaaaaagttatgaagcacgaatgcttgaaatggaaaagaaagagcaggaaagccttgaaaaggcgaaacgatatgcggcacagaagaaagaacttctgaagcgaaagaaagccgaagaaagtaaaaaacgaacccataggctctgtcagattggcggtgcggtggaatccgttctcggtgcgcctattgaggaagaagacatcccaaagctgattggttttctgaaaaggcaggaagccaacgggaaatttttctcaaaggcaatgcagaaagaagtcaataccgatatggaggaagtgtaatggcggaggggatgagtttttcattcccttcattgctttttcatgaagggcgcacttatggacaaccagaggtcgtcccaataagtttgccacaagtggcaaccggtctgcgttcacgcttgccgggctcgttccgtcggcggggctttcagccagacctgctcatgccgcaggaggcactcttcgccagagaggcgcattccatgcaggctgctatgcgcagggcactcttacgcagagggcgttccggcaatgctgcttttcctaaaaccgaaagcaatgttgccggaaatctatgccggatgtgcagaaaggaggaatccagacatggcgatttttcattacacagtcaaaatagtcggacgaagtaaagggaaatctgttatctccgcttccgcatatctcaatggggatgtgatgaaaaacgaggaaaccgggagaatcagttattacacttctaaaaaagaagtggtctacactcggctgatgatgtgtgaaaacgcacctcctgaatggcagatagtaccagaagaaaatataaaacgctttcaaaaatctgtccgatacaaaagatcagaagataaagaagctgctttagaaaaatttaaaatcacatttcagaaacaaaggttatggaatgaggtattgaagattgaaaaaaatgcagatgcccaacttggcaggtcatttgaatttgcccttcccaaagaatggaacagacaggaacaaattcaatatacaactgactatattcaaaaaacttttgtagatagaggaatgtgtgctgattggagtatccacgataaaggggatggcaacccccatgtccatctgcttctgactatgcgtccttttaacccggatcattcttggggaaagaaagaagtcaaggattgggattttctcagagataaaaacggaaatatcgtgattgatgaatcccatccgaactggtggcaggataagaaaaaccctgaccgtcatggaatccgtatccctgtattagacgaaaacggaattcagaagatgggtgcaagaaaccgcctgcaatggaaacgggtgctgaccgatgctaccggatggaacaatccaaaaaattgtgaactgtggcggagtgaatgggcaaaggtgtgtaatgaacatcttcctttgcataatcaggtcgatcaccgttcttatgaaaaacagggaaaactccagattcctaccatccatgaaggcgctgacgcaagaaagattgaacaaaagtttcttgccgggcaggaaataaaaggttcgtggaaagtagcggaaaatcaaatcataaaacaacaaaacacgttattgcaaaagatactggacacctttggaaaagtatcgggtgcattatcattatggaaggagcgattaaatgacattagaagaaagccgggaaattatacccttaatggaatccatgattgggcaaatcgaagaacagcagaccttaatggcagaaatgattctggaaatgcagaaccgggacacccaactctctcttatgcaggaacagaatcagaaattgcaaaaattaaacagcgagttatccgagctgctcaacattttgccaaataccgaggaactgctttccaagatggaagaacagaaaacgaagatagaacttttggaaaacgaaaatcagcaatggcagaaattggcacagactctgaacagcgaaaacagtttattgctgaaacagaacaccgaattgctgaactggaacagcaaataaggaaaggacgtgatatagatgaacgaatccagagaatcaaagaacgccgaacagttggaagaacttctgctcttgaccgaggagatacaagaagaactggaacagaaagaccagcttatcgaggaactgaagacgcagctcagcgaatctctgaccttgaacgagaaattaaacaaagagaacaaagccgggaatattcaagcattaaagaacgacttgaagctggcagacagagcattgcagatcgagaaagagaagctgcgaagcgcaaacgtcatgatcggggaatgtcaagataaaatacgatgcttaacacaacaacgggattatgcccggacacatcagaaaatcgtagagataccggtagaaaagccggtactctatgaaaaatgtgaagcctgtgaccggacagactatcagaatgcaaaagcaaaatacgaaacacaaaaagagcgacttgcaggacaatataaagcaaaaacggtaatgttccaaacaaccttgttccttcttgcatggtattcgctgacaaccactctttttcaggcagtacagtcagatgtgttcctttccgattgtaaatcattcttccatgatgcagcgtcattcatacaaacttttatcggatggacgattgctgccggacattctgcggcacagattagtaccaaaattccaaatgcgtttatagccgaaatcatatattggttattgctgatattggttgtcggaatatgcgtagcaggaacagggatactggtgatactgatagaaataaaggttatagaattatataagaaaaactgttgggattttattactctactgatgatactgacaagtgctgctgtcatcatttattttggagaatccatcaaaaaaacactgtcagtaaatcttctattgctttttgtactttcgcaaggagtatatgttggacttagatgttatttgaaaaatcagttaaataccaagctatattgatcaaaatatgataaaaaacgtataaaagcaggggataaaaacacacatcgtcccctgctattatattatccttttccaatttctagtaggatatgcctgtttcattatgcttttttaaaagccttagtttgaatgctttactgtatttcttcctagacataaatatgctccacatggtacataaaaaaggacatggcaatacctccttgataccaccgtatccttgaaaaagggcgactttaacacaccctccgtattctcatttttacaaaagaaaacggcggttttgattgttatttcaaaaccgccgttaaaatggcatgagaactttctacttcataagcggttttttttcatgcttatgaagtagagaatttttaccttatcgtaaattcgcaagataaattatatgtatcgtaatcccaatctctttcactttcaaagaacgcaaattgtttaatcaaacgatagtgtccagcaggcaattctccataaaaacttttaacatcaatttctaatgttaatcgttcgttaggcttaataaagcaatccttttcattgctctttgaggggtcatcaagctgtttaagttgataccaagtgccggattgttcagcttctatttcaaaataatctggtgaatattggtattctttatcagaagtattttctattagaaatgaaaggtgctttaagtctaaatccttttctgtactcattgaaatcttcaaatcgcccaaagtgtcaagcgcttcttcacttccataaggagaaacctcatattcttcggaataatcttgtactacatgattatcactgtcctttgcttgactacacccaacaatacacaccaataacaataaggttagaaacatacatattatttttttcatttgtccttatctcctttcttttaaatttataatagcaataaaatgtctattttcaatcaactttcattgcaatttattttcactgtaacacatgctccccctgctttattattagcaatttggatatttccgccatgtctttcacttaaaatcttactaatattcagccctaaccccaaatgttcagtagctatatctttcgatgatttataaaatggtaatgtcgccttttcaatatcaatatttttaaacccgcaaccatcgtctgaaacagatataactaaattatcattctctattactacgctaatagcaatatcactttttgcgtatctaatactattagagagtaagttttcataaatctgcatgactgtatctaaattgataaacaaggttatattattaccgcttgtagtaattgaaaaatgtttgtcataacaaagtgcttctgctgtgttattaaaattatcaataagtgaatgaaatgtaatctgttgtcgtggaatatcaatatcctctaacctgtataagttcgtcatagcatttacatatttttcaagacgtgaaatattttttgacattactgatatttcatctaatatttcttgttgtgatactaagcctttgggaataaaggaaagcagcatagtagcatgaccctttagtaaagtcaaaggagtgcgtaagtcatgcgaaaaagcagcatttagacggcgctgttcagcaaattgtcgaaacatagtttcattatttttcgacaaacagtctttcattttttcaaaggcatgacaaagtttccccatttcatcatttaatggatatgataacgtaaaatctaagtcatttgcttcaattttatgatacgcattagttaatagcttaataggtttcgataatttttttttataaaaaaatgttacacaacatatcatactaatagataatacgataggaataattgcaatatttaatgaacctaaagcactgtcaataagcctatcccggtttgtaaaattaggtaaaacttcgatatatgaaacatggttcggatagacatattcgtgtactgggcgttctttttgataatcaacattgaacttgcatatctcgtttcctttcgtgtcaaatattgtgtattttgtttggtcattactataagtggcggtaaatgagccattttccggtatatcatacctcgttgacagattttcatacttatagtttaaatttattctgtatctgtcaaccattgaaattaaaagtatacaaataattattccaatcaacaacgaaaacaaagcataaagaacaaaggtcattctaatactcatgctatttaaccgattgaacaatctgcttctctttaatttttccatctatatccgcacccccaaacagtttcaatgtaaggtctatcgcctaaagataaaaattttgccctaatacgtctgatatgttctgtaacaactgtattatcaccaatgccgtctaatccccaaactttttcataaatagtttcccggtcaaaaacaattcctttgttttgcgaaaggaaagatattatatcaaattcctttttggtaaaagccatatccttattatgataaaacacaatacgtgaggaataatctataaccatatcttcatcaaattgcacctttgaagatatattgtgtcttttttctctgcgaagatgtgctgcaatgcgagcttctaattcatcaacagaaaatggttttattacatagtcgtctgcgccaatagaaaatccttttattttatcactatcttcaatgcgtgctgttaaaaaaattatagggcatgaaacataatcccgtatcctttcgcaaacagtaaatccatctatatctggcatattgacatctaacaaaataatgtcaggttttttttctacttcttttaatgcagcatttcctgctgttgcagtatataccgtatatccaagtttgctgaaatagcaatacagcattgatacaatttctttttcatcgtctacaattaaaatactctgcgccataaatatgcctccattgtgaatatctgatttaagattatcaaacaaaaatctatttctaatcaatttctttaattttcgatgtcattagttattatatatggcaatatgagttgtagcaaccttactctacatgttttatgctctattactatccacactatgatgtgtgtaatcatatcccgaaagccataccaaacaaagcagtctatggcagatttagaaataagtcctatgattattgaaaaataagaaaatataaaaattagagtgaagtaattatattacaaaaatgaaaaacgggagatacacagatattgtgctatctcccatattgtttttagtgtcatatcaaggctcatttattagtggtaaaattagcgtttttctatatttctcaaaatgcttgaaagtaaagtgttcatatggataatcgaaaatcagatataaacttttgtttaaattgcctataattcaagtgaatcttctgcatccacccacatctgtaaattgccatcaagatataatcttgcatattccaaaggctcatccacagccaatgaagtaagcgcacattctgatccatatgtggtttttaaatttttttcagcttcccaacaattaatgcgaagcatatatccggcacttgtgtaaacatcaatactatcgtggtttatgttgtattctgcataaattgttctcattgtatcttatctccattttttaataatcatttacagagttaaatatcgaaaacatttcattcagttcaccatgtcgttattgttatatgttatactatgtacgaatttttctttcccttaatttttcccatattaaggttcatgaaaaccaatgagagaatataatacaagggaaagagtaagggaaagttcacttgctacaaacttagtattttcaagggtttgtgaggaatttgataatcaaatataacagttattaaatttcctaaaataagtgaaatatcaactggaaattttcaaattagtctttgcaaataacctttgaaccttcaccatcaattacaattccctgacggttgttaattgggcatagattcaaatccgaaaactcagtcattattttctcggtaactttcttaaatggtgctgtaagataatgcggaagaacatagaaatcaatcaaatcaagccctgcatcatcttcttgtgagtagtcctccggcttttcatccatttgctcgatatattggatgcttggagcgcatataatcgcacctgccgattcaccaatcatcagttttccctttgccaattctttcttcaacagctcatccgttcccgttttacggagctggtctataaggaaaaaagaatttccgccggtaaaatatatcacatccgcatcttcaaaaacagactgtatcgttgaataagcctccgttgaaatatcaatttcagttacgattgctcccaactttttgaataattttcgagccgagccgacataaccggtgtagccttcacgcagcgaagctgttggaataaatgcgacttttttattttcaatttcttcctttatcagacttcctacacttgaaaagtgcgaacataaaaacagtttcatcaatattctcctttatatataaattacgatttatctatttgcataatcaatcaaaatcttcttacaactactacaacgataagcttcacaatgagggattcctcctgaacctttactcaattccagatcgtccgatttttttatacgaaaaacttttgtcagattatcaactgcaaaagtaatgtctcgtgaactcattaggtatcctctaatcatttcatcaccacaatatggacatttcatgccgattcacctcctataaattccgattttactttgtaactatgacttttccttctgaatccagaagaggtgtaatactggctccaaatccggagttccaacaaaggtaattaaccccagtcttcttatctacaaggatttgacgaattccttcatctttaagccaacttccgtctctgaatgtaacttcaaatctttcttctttctttgccatgtttatttctccttttttcaagcgttaaataccgattttcttgattctgcaaactttatcgtcttgttccattcttatcaaaattcttttttaatgctatttctgttgggagaatagacccaattaaaggaataagttgaacaccacaaataattcctcccatactcccaacacaatcttcattttttccaattactaaaagcatgaatattactgttatcggcaacataaccattccacagacataccagactttaccacaatatttatgagcaaattcccatgtgtctttattcttgccattcaaatcatatcacactatcagacatatttccatttcgatttactcagtcaagtctcttcgctcagctacatttcctgtcggcttgcttctgtaactagtacagcgtttcacaaataactgtctcattcacgcagaatgcggattcgattgctcagctgaaaaaacgtaggcgtagcgggctacgtcgaggctttttcagctgagcaatcggattcgcaggcaagtgtatgaggcagttattttgaaaacgctgtactaacatccggttattaagaagtctcttcaaacttactacaccagtaacatgaagtagtaatataaaaagctttcggattttttcatttgaaccgaaagctttttatttcatcatcttctattatatctatcttcctgtctaaccggcactctgaccggtactggttctggcatcagtcccgggatcagacgatccataaaatctttgatcttcttccctgcttttgtattgatccatctataatattgttctattgtcatactgttctacctcctattcaggtctcctatcataagtaaatgatctgcatttctgctatatatacctatgccatattattcttttctgacatggctgtattttatcagatgattttctttttgtcagtgcatttaccgcttattttagaattgtttatacttcttttatgaagttttgaacacatttatctttgtcatcatttgacataggagcaatctgattttatagaattttcatttccccacatttgccacattctcccagatatgttatgattgtaactgttctattgtgattcgtttttgcatcggttatgatactgattaacacagacaagatatctttcagaataagaacaagaatatcagaaatggggagtttatatgttatctacatcgaaagaacctgccgcaaaggagaaggactctactgtgaaagaacttttccaatggctgatcgccattttagcggctgttgctattgctttatttgttgataattttctaatcgtcaatgcacaaatcccttccggttcaatggaaaacaccatcatgaccggagatcgtgtggttggtaaccggctttcttatttaactaaggatcctgagcgttatgatgtaatcatttttaagtatcctgatgatgaaagccagctttttatcaagcgtatcatcggactgcctggtgaaaccgtagagatccgtgacggtcacatctacattgatggatcttctgaaccgctcgaagatgtagagacgaaagaatacatggtcggaaactatggtccttataccgtaccggaaggatgctattttgtgatgggagataatagaaatgattcgaaagattcccgctactggatgaatccatatgtatccaaagataagattcttgggaaagcagtctttcgttactggccaattacagaaatgaaaacgattaaataattttcaagggcagatctgactcatacgagttaaatctgcccttactatttacatcttataacaacctttttcagaaatcacaaaatccatccgcagatcatgttcctccaccggaatttcgtctacaagcagttcctccctgcaaagtgctgctttcacgcaatgcgtcttttccagatatctgtcgtaatatccacctccgtgaccaaggcgtcttccgcttctatcgcagctgatacatggaatgaaagcaaaatcaattgcttccggctgaatcaatctttccgggtcttcttttggttcaaggattccatatgcacccggatacagctcttgtaatgagtggatctcgtatacgttcataattccttttcccgtacactttggcactccaagatgctttcctgattgaagaatatcttgcaatatagaaaatgtatccatttctttctctgtgctcacataacagaacacacagtctgcgctcttgtattcattcagtttcaaaacactttctgtaatctttctgtctgcttcttttctgtatttttctgttgtaaaagaaagtttttcttttatttttcttctcaattctttcttttgaatcattttctcatctgtttttctttccaattcttccactcttttctcttttcgcttttttcctcttgtttaactattttctttctcctgttcttctccgacagattcaatcagcaggtgatccaaattttgcaggtctgcttttctgattccatattttccctctttatctttttctacatgaagaacaattttatttggttttccgtacttcagccctttctcttccgcctgtcttaaaacctcataatagatctgataaatttctgtctgcatctgtgtttcttctggcatagcctgtccgttcatcacatcatttgaaacttttgtggcgtattcctgcgccttctcctgaaattcagcataagtatccttcagcaatgtgattggtttcactgtaagaacaacctgataagttccattttcttccctggttgcttctcctacagtataagatgtcttctttgcaagatctgcaaacagttctctatattcttctgtcatctcatctgtcattacatgctccggaaatttttccattgtataagcaagattatcttcgaaaacctgttttgcttctttctcggaaatgccggtctgttttatataggattctgttttctgcttataagatacatctaaaaatgcctgtacatattcctgcggatcaaaacggtttatgtaacaatagatcattgttgctgttgctgcgacgataattgcaaccattataattcctactataaaatgcttcttttctttttttcctgacatcaactttacctcttttctaactgtaatttgaataacttatttgtaactgttcagaaccaagcaaaatttcaaaaacaggtataaaatgcttgcatttttaaaactgtttttgaaattttatttggcggatacgccacaccgacgaaatgcgtagcattttggaggttggctctgaacagttacacttattttatttctgtcacagtatagcataatatcagttcacattttgtagaacgatgtcgcatggtatatagcgcttttcagatagatggaacgataccgccttgtatgcagcgcttttcagatagatgaaacgatgtcgcctgcatgcagcacgtttcaaatagcaagaaagagatacgcaaccgtatctctttcttcttgcaggcttgtttcttttgtctgctttctctttcatttacagatcaaatctgatcttgatatatgctttgatctcttccacgcatttctggaatccaagctttccactgttcaggcacaaatcataatttcttgcatctgcccactcgtgtcctgtatggtaacgatagaaatcaccgcgaaatttatccgtcttctcaatgtattttttcatttctttttctgtcatactgttacgctccatcgcacgatcaagacagaatttctcatctgcatgaacaaacacactgacaacatttggattgtctttcagaacataatctgcacatcttccaacgattacacaggattctttctcagccagatctttgatgatctttgcctgatagttaaagatattttcttctgaaacgaagtctttatcttccggcggaagaagttctccgtcatatggacgactgaggatcttgaaccagccggctcccttcatcttctcatcactcataccgaagagtctctcgttaattccgctttcctcggatgccatacgcaggatttctctgctataacagttgattccaagctcttttgcaagcatagctccgattgtcttaccaccgcttccatactgtctcgccattgtaattacaatattgctgctcacctgaatcgcctcctattctcctaaatacgctttcttaactgcttcatcttccagcaggtcttttgcatttcctgacattgtgatcttaccagtctcaagaacataggcgcgatccgcgatagaaagagctttctttgcattctgttctacaagaagtactgttgttccactctcacttactgcctggataatatcaaaaatctcatttacaaagattggagaaagtcccatagaaggctcatccatcagaatgatcttcggtttagacatcagtgcacgtcccatggcaagcatctgctgctctccaccactgagcgttccggccatctgatttcttctctcttccagacgtgggaatctcttataaacatttgcaagactctcttcaatctcatttttatcttttcttgtataggcgcccattttcaggttttcgtaaacactcagttcagcgaaaactcttcgtccttccggaacgtgagccattcccatagacacgatcttatgcgccgggatctttgtgatatcagttccttcaaacataacagaacctttctttggagaaagaagtcctgtaattgtatgaagtgttgttgtctttccggctccgtttgcgccgatcagtgcaataacctctccctgatttacctcaaaggaaatgcctttgattgcctggatcattccataatatacttctaagtctttgacttcaagcattgccattgttatcttccccctattctcccagatatgccttgattacctgaggatcattcagtacatctgttgtcttgccctgtgcaagtacttcaccgaagttgagtactgtcagctcctcgcagataccacttaccagtttcatatcatgttcgatcaaaaggatcgtcatatgaaactcatctctcacgaaacggatcatatccatcagttctcctgtctcgttcgggttcattcctgctgccggctcatccagaagaagaagctttggatctgtcgcaagtgctctggcgatctccagttttctctgctgtccataaggaaggtttgcagccttatatgacgcaaacttctcaagatcgaataccttcagaagctccatcgccttttcattcatctctttttctaccttacgataattcggaagtcttaagattccttcgatcgtagagtaatgatgatggttgtgaagtcctactttaacattatcaagaacagtcagttctttgaaaagacggatgttctggaatgttcttgcaattccggccttactgatctcaatatttttctttcctgtaagatcctttccgtccaaaagaacctttcctgaatccggtttatatactcctgtcagaaggttgaatacggttgtcttaccggcaccatttggtccaatcaatccgtaaagttcttctttctgaatcttgaggtcaaagtcatttaccgcacggagacctccgaaagaaattccaagattttttacatctaataatgtactcattcttacttaagcctcctttttctttccaaaatgaagatacttctctctccactcgattgcctttggtgcccagttaaagagcatcataatgatcagaacaatcgcatagatcaacatacggtaatcagacagtccacggagaagctccggaaggagtgtcaggataactgctgcaataatagatccacgaatatttccgattccaccaagtactacaaagacaagaatcgtgatggacatattgtatccaaagttgtttgtatttgctgtcagtgttgacaggttgtgtgcatacagaacacctgctgcaccggccatagctgctgaaattgtaaatgccatgagtttatattttgtaacattgattccgatagactcagctgcgattacattatcacggattgccatgatcgcacgtccatctctggaattaatcaggttgagtacgataaataatgtcaccatgatcaggataaatccgatcaagaaagttgaatccttcggagttcctgtgattccctgcggaccgttcaggataactgttccgtctggatccatgtcaagtgccataacgtcctttgttgcaaaatgaaatcctttggaatcctttccaatataaagaacatttacaaggttcttaatgatctcaccgaatgcaagtgtaacgattgcaaggtaatcgcctttcagacgaagtaccgggattccgatgataacaccgaagattgctgctactacaacaccgatcaaaagtgcaagcagaaatcgtacaatcgaattctcgatcacatctctcatacattttgagaaaaatgcactggaaaatgctcccacacacataaatcctgcatggccaaggctaagttctccgagaatacctactacgaggttcagagaaaccgccaggataatatatgtacaaagcggaacaagaagtcctgtcaaaagactggaaatacttcctgtactgctcaaaatctgcatcactacgaatgctacgattacaattgcgtaagtgatgagattacttctctttgttttattcatattcttcaacataattccatccacctacactttctcctgaatcttcttgcctagaagtcctgtaggcttcacaagcaacacaacgatcagaactgcgaacacgatcgcatctgcaagctgggaagaaatatatgccttactgagtatctcgatgattcccaaaagaattcctccgataaatgcacccggaatggaaccgattcctccaaatacagctgccacgaacgctttgatacccggcatcgcacctgtgtatggcgttaggctcgggtaggtagaacacagaagcacaccggctactgctgcaagtccggaaccaatcgcaaatgtaagagcaattgttgcatttacattgatacccattaattgcgctgcgcctctatcctctgatactgcacgcatcgcctgtcctggttttgtcttctgaacaaatgtgatcaatgcgatcataataaccacacaaactacgatcgtaacaattgtctctcctgaaatattcagcttaccatctgcaagtgaaagtccgctccacttgatcactgatgggaatgtctgtgcattcgcaccgaagatcagaagtgctacattctgaagcagataactgacaccgatcgctgtgatcagtacggcaagtgaagatgttgcattacgaagcggcttatacgctacacgctccatcagaacaccaagtactgtacaggcaatgattgaaatcaggattgccacccaggtaggaagtcctgcctgcttcattgtgatcaaagctatatatgcaccgatcatgatcacatcaccatgtgcaaagttcaacatcttggcgattccatataccattgtgtatccaagcgcgatcaacgcatagacactgccaagacttagtccatttactaaatatgaaataaagctcatatccgtccctctcatcctttttatatttttgcaaggtactactttaacctcttaaattgaattgattatagcataattattttctcgtatcaatacaaaaaacagaatccgctctgtttttttattaaaacaggcttttatgaagtaatccaagtactgttgtcagatcttcaatccccatctgtcccggtgcagatactttcccaactgctccaaatgtcagtgcagagccaaagacttctccacagagacggctgatcacacctgttcctgacatagacattgtaatgatcggacgatctgcatactcgcttgccatctcttctgtcgctgcaagaagtgtaagaacatctttcttattctgtggcatcacagcgatcttcggaatatctgctccaagatcctgcatttttcttaaacgggatacgatttcctcttttgccggagtcttgtggaagtcatggttcgaagcgatcacttttactccatttgcatgtgctgtctcaacaacagccttcacagcctcatctcctgtaaatgcctctacgtctacaaggtcaataagtcctgtctttgctgcattctgattcagttcaacataagcccctgtctcgattgctttttctccaccttctttggatgtgcggaatgtgaaaaggatcggcatctccccaatcacctcacgaagtgcctgcattgtcgcctctgtctttgcaaaatcaaagatatcttcataccagtcaacacgccactcaacaacatcagcctttgttgacttgatattctcggctgctgcaagaatctcttctcttgttacgccaacaataggtacacagattttcgggattccagcgccaatttcaatatttcttacttttactgtattcatgattttttcctttcttaagcttcttccgaattcttcagaagcacaccatatcttacatttataaaaagtataatataaataatagcacaaagatagaacagcatgctatagaaaattcacaagcttgaaactatggccacaccaacggaaaaacatcttgtaaatcaaatgactaacactgctccaaaaagaagtcccccggcagaaacgatgtctgtcggggggatttctcctattcttttaatgtatctacaaagagcgttgctactctctgtatttatttttctaaacgaatctgatatatcaattattcagcagcatcttctgcctgaagtacctgatactctccactcttaacaacaactactgtaggctcttttgtaggctctccatcctctgaccatgtgatgctctttcctgtaagtccatcatatgtgatctctgtcataccttttttaagtgcgtcacagatatctgatacgctcttatccggtgtaacatcttctttctcagctgctgctttgattacgtatacacagtcataagcatctgctgcgaactgaatcggtgtgtctccgaatgcttctttgtaatcagcaacgaatttctgtgttgcttcgtctgtagcatttgctgtaaatggtgtaaggaacattaagtcttctgcaagacttgcgtcaaatccatcaagatcaaggataccgtccataccgtcacatccgaaccacttcggtgtaaatcctactttgtttgcctgagcaagaatcagagaagcttcctgatagtaaattggaaggaatacaagttcagcacctgcatcttttgctttctggatctgtacagagaagtctgtcttgttatctgctgtaaatgcttctgctgctacaacatcaagtccttttgcctttgcctctgtcgcaaatgtctgataaattcctgatgaatatgtgtcagagctgttataaatgattgctacttttgttgcaagcttgttctctgcaatgtaatctgctgatgcgctaccctggttaggatctgagaaacacatacggaatgcattgtcatactggatactgtctactgctgtagcagatggtgtcagctggaacatgttatctgaatgagtctcctcaacaactgctgtacaaggtgtagaagttgttgttccgatcagtgcctgcattccccagtctttcagagtattgtaagcgttcacagatttctctgaatcagcctgatcatcttcaaacttgtattcaatctgctttccgttaattccgcctgccgcgttgatctcatctactgcaagctgaataccattctttacagctgttccgtagattgctgcatctcctgttgtaggtccgataccaccaattttaaatgtatcagagttggatgatcctccactctttccactatctcccgaacttccacatgctgctaatgaaaataccatagctgatgcaagcataacacttgctgcttttttccacatcttcataataatctcctcctagaaattaaaataataaactttatgtgtcatatattagctcgtagaagtatgatttgtcaagcagaaatagagtgcaatctgttttttatctatattcgttaaatatggtcaagtgatgttaaaatagatcaagttagttgttatatctattaatctgatatcttaatacatttcgttctatggaatcaggttctgtttctaaccatgataatgcagacttaacatcaaccgaaaaaccacttcccaaatatttaaccatcttttcatgagagccacaaaatggacgtgctataactctttttacattttcttctatagaaaaattccaatttacactttggtttgctgtcaacaaagatactccgttatcaaaaattggtgccggataaaaatcatttccacacataatcaaagccagattatttaaatgcctgtcctcatttaagcaaatcatatccaatgtcaacactttactcaaataagcatggatgtttaatccacagctttgatcaataaaccggataacatattctattctttcttccattgtattcatgttagctatgactttcgaaagatcttttccaacttcattataatatagcttataaaacgtgactaattcttcctcttcatctaaaaaatttttactcctacatcctgattttccattaattgttccttcttcataacttataaattcattttcttgaagtgtagtaaactgcataaactttgaaacaagatattcagcacgtccttcatttcctctattatcttttttataccaatagccgtcttttttatacttaacctgggttccttcacttgttccttcttgaataacaatataatcatttcctatattttcactaaacatatcttcaccttaccaatacatctttgcttgtgatattttctcccggaaagcgaaaccatataaaatcattatgactgacaccatgtgtctttcgtactatttcatatggattatactctttaagtcccagatgttttaagatttcatcaatatcaggcctgcctttttcaaagcatcttaattctaagatcttgcctaactgataacgagtcatcttcttctctgcaaatagttgtcgccctggattgtctgaaaagcgtgatacaataacatttttctttttcacatatactctggccgtaatttcatctttccagtatacttcaaaagtaaattcatccatgaaattttcttttttagtcctcttctcatagcacgctatcatcttacttgcagtcataatatcccattctaagtcttgtatctcatttgacaaatgctcaattcttaactgaatattttctatatctgctatctttcccggaataactggagacagatatctgcttttgacctttccatctttacgttgttgtgcataataatataattcgccatgaattttctttattgtaatattttgcttttccgtagaaatttcttgtaattcttttttcttaatatccaactcctttttataaagtgcttcttgatattttaacattctataagtttgttgtatctccatagttcatcacccattattattgtaacctatatttttatttttttcaatgtgtgtaggttacttaattttgtaaagaaaaaaacagcgctttcgcactgcttctcattcctgtctatattccatgtaccttcaaaactacatacagttaaaaccaacatcatcatccaaacctatcactgctttggttatgccctcgacctattagtaacagtcagctccatgtgttaccacacttccacctctgccctatctacctcgtcgtcttcaaggggtcttactaacttgacgttatgagatatctcatcttgaggggggcttcacgcttagatgccttcagcgtttatcccttcccggcttggctactctgctatgcctttggtaagacaacagatacaccagcggccagtccatcccggtcctctcgtactaaggacagctcctctcaaatatcttacgcccacgccggatagggaccgaactgtctcacgacgttctgaacccagctcgcgtaccgctttaatgggcgaacagcccaacccttgggacctacttcagccccaggatgcgatgagccgacatcgaggtgccaaaccactccgtcgatgtgaactcttgggagtgataagcctgttatccccagggtagcttttatccgttgagcgatggcaatcccactttataccaccggatcactaagtcctactttcgtacctgctccacccgtcggtgtcgcagtcaagctcccttctgcctttgcactcttcgaatggtttccaaccattctgagggaacctttgagcgcctccgataccctttcggaggcgaccgccccagtcaaactccccacctgacattgtcccccagccggatcacggctgctggttagaaacccagtactgcaagggtggtatcccaacattggctccatggcaactggcgttaccatttcctagcctcccacctatcctgtacatgcaataccgaatcccagtatcaagctggagtaaagctccatggggtctttccgtcctggcgcaggtaaccagcatcttcactggtatttcaatttcaccgggtgcattgttgagacagtgcccaaatcattacgcctttcgtgcgggtcggaacttacccgacaaggaatttcgctaccttaggaccgttatagttacggccgccgtttactggggcttaagttcaaagcttcgcttgcgctaacctctccccttaaccttccagcaccgggcaggcgtcagcccatatacctcacctttcggttttgcatagacctgtgtttttgctaaacagttgcttgggccaattctctgcggccatcttactggcactccttctcccgaagttacggagtcattttgccgagttccttaacaatgcttctcccgtcggccttaggattctctcctcatccacctgtgtcggtttacggtacgggtatcctgcaaacaatagcggcttttcttgacagtcagctcacgtgcttccctacttattttcagtccacatcacgtcttcagattgaagagcggatttgccaactcttctcctacctcgcttgtaccggtctttccattcccggctcacgctctctgcctgtgtccccacagttctgttacaggatagtacaggaatttcaacctgttatccatcgactacgtctttcgacctcgccttaggccccgacttacccagagcagatcagctttactctggaaaccttagatattcggccggaaggattcccaccttcctctcgctactcattccggcattctctcttcttaaaagtccacagctccttacggtactgcttcgtccctttaagaatgctcctctaccaattgaattctcaattccaaagcttcggcagtgtgttttagccccggacattttcggcgcaggacctctcgactagtgagctattacgcactctttgaatgaatggctgcttctgagccaacatcctagttgtcttcgaaatcccacatccttttccacttaacacacattttggggccttagctgttggtctgggctctttcccttttgaccacccaacttatctcggatcgtctgactcccatacatcatctacacggcattcggagtttgatatcccttagtaagctttgacgcccccttaggaattcagtgctctacctccgcaagactcgtatgaggctagccctaaagctatttcgaggagaaccagctatctccgggttcgattggaatttctcccctatccacacctcatccccacccttttcaacggatgtgggttcggtcctccattgccttttacggcaacttcaacctggacatggatagatcacccggtttcgggtctactccgactgactatgcgccctattcagacttggtttcccttcggctccggacctttagtccttaacctcgccagccagcgtaactcgccggaccgttctacaaaaagtacgcggttgagcatataaagctcttccacagcttgtaaacatatggtttcaggttctttttcactcccctcccggggtccttttcacctttccttcacagtactatgcgctatcggtcactaagtagtatttagccttacggggtggtccccgcatcttcccacaaggttccacgtgtctcgtggtactctggatcccgccatgtcaactcgtctttcgcttacggggctttcaccctctctggccggctttcccaaaaccgttctgctaaactcgttgaatcaattccgcggtccgaaccccagcatgcacgcacgctggtttgggctcttccgttttcgctcgccgctactcacagaatcacatgttgttttctcttcctccggctacttagatgtttcagttcaccgggttcccttccttaagttatgtattggcttaaggatacttgaggtttgctcaagtaggtttccccattcagaaatctccggatcaaaggatatttgctcctccccgaagcttttcgcagcttatcacgtctttcgtcggctcttagtgccaaggcatccaccatacgctcttatcagcataaccaactcgacctcatcccacgggaatgggataatgtccacacatacatagcgttgtatgcgttggtgatagtcaatttattttaagtctgttttcttcagactgtaagttaatgttgttaacattacctcggatgtcttgattagatatttatctaaatctattgatttttactatatgcagttttcaaggtacataagatgaagtccttattcagttcttcatccgactgactttttcatcagtcatcagagactaaaagctttcttttaaactctgatcactggtgaagaccagctttatcgcagaacctctcggtttattttctttttaatttggcggccacctactctcccacaccgtctccagtgcagtaccatcggccgcttaggtctttaccatcgtgttcgggatgggaacgggtgttacccctaagcgcatcgccaccaaaaagtttggttacttgataacccaacaatagacaacagtaaaactctctacttctttcttccgttttagttggattgttccagacgaaagaaagcatttcttccttagaaaggaggtgatccagccgcaccttccgatacggctaccttgttacgacttcaccccagttatcggtcccaccttcggcagctccctccttacggttgggtcactgacttcgggcgttactgactcccatggtgtgacgggcggtgtgtacaagacccgggaacgtattcaccgcgacattctgattcgcgattactagcgattccagcttcatgtagtcgagttgcagactacaatccgaactgagacgttatttttgggatttgctcgacctcgcggttctgcctccctttgtttacgccattgtagcacgtgtgtagccctgctcataaggggcatgatgatttgacgtcatccccaccttcctccaggttatccctggcagtctctctagagtgcccggcctgaccgctggctactaaagataggggttgcgctcgttgcgggacttaacccaacatctcacgacacgagctgacgacaaccatgcaccacctgtcatccctgtcccgaaggaaaggcaacattacttgccggtcagggagatgtcaagagcaggtaaggttcttcgcgttgcttcgaattaaaccacatgctccaccgcttgtgcgggtccccgtcaattcctttgagtttcattcttgcgaacgtactccccaggtggactacttattgcgtttgctgcggcaccgaacagctttgctgcccgacacctagtagtcatcgtttacggcgtggactaccagggtatctaatcctgtttgctccccacgctttcgagcctcaacgtcagttaccgtccagtaagccgccttcgccactggtgttcctcctaatatctacgcatttcaccgctacactaggaattccgcttacctctccggtactctagattgacagtttccaatgcagtcccggggttgagccccgggttttcacatcagacttgccactccgtctacgctccctttacacccagtaaatccggataacgcttgcaccatacgtattaccgcggctgctggcacgtatttagccggtgcttcttagtcaggtaccgtcattttcttccctgctgatagagctttacataccgaaatacttcatcgctcacgcggcgtcgctgcatcagggtttcccccattgtgcaatattccccactgctgcctcccgtaggagtttgggccgtgtctcagtcccaatgtggccggtcaccctctcaggtcggctactgatcgtcggcttggtaggccgttaccccaccaactacctaatcagacgcgggtccatctcataccaccggagtttttacccctgcaccatgcggtgctgtggtcttatgcggtattagcagtcatttctaactgttatccccctgtatgaggcaggttacccacgcgttactcacccgtccgccactcagtcaccaaatttttcattccgaagaaatcagaataaggtgcttcgttcgacttgcatgtgttaagcacgccgccagcgttcatcctgagccaggatcaaactctcgttaaaagtgtttgtatccagttcagaaccaactaactagctaattcttccctttttactgttgttttggtttgtttaaaaaccgttcttaaaaatcttctcttaaagaaattttcaagggttgttgttgtctattgttcagttatcaaggttctttctttgtgtcgttcttttcaagcgacagcttttatattttatcaaaagcttttgtctttgtcaagaacttttttatttttctttcactgccgaatccgtttgattacttctcactagcagtgtatttatgctatcacattcgaacttttctgtcaaccactttttaaaatttcttataagtttttatcatctttacttataaatcttttcttcgaactttttctctctcagggactgtccgcctccgcgccttcctcttattcaagcgtctgttctgtagtttttcagtgccgttctcagcgacgaatgttatcttatcatagctatttctaattgtcaatgttttttatatatttcatgtaattcagaatattctgaaaaattagcatctgcgttcccaaacactaacagctattgcaagcttgcttgcactaagctgatagggttggggaacatagggcgaatgcccttaaccgaaaggacgtcagttctttcggttcttgcagatgcataacatacatttcaaaacacgacagctattgcaagcttgcttgcactaagctgatagggttggggaacatagggcaaaaactaaattaacataatcaacttaatcttcgaatcagtttcaggattctgtttgcacaaagacggatttctttttctgtaagttttccttctttatacgcatcacgaatgtttttatcatcatccggatttcccggcataataatatcatttcctgctgccacacaaacccacggaatgcttccatcctccggtactgttgtattccagtcagacatgataactccgtcaaacccccactcttcacgtgcaatccttgtacaaaggtccttgctgtttgctgcatgcacaccattgatcagattataggaagacatgattgcagttggtgcaccctctttcactgcaatttcaaaacctctgagataaatttctctcaatgttctttctgatatatgtgcatcaacacccattctgttatcttcctgattattgcatgcaaaatgcttgattgtaacaccacatcccggtctgctctgaactcctctggtcactgctgctgccagtgtgcctgcaaggaatggatcttctgaataatattcaaagtttcttccacacagcggatttctgtgaatattcaatcctggtgcaagccagagattaatatgaaattcttccatctctgccgcaaccttccgtccaaactgttccatcagttttttgttccaggactgtgcaagtgctgttcctaccggaaatgcagtacaatactgatagtaacgttctgcgccctcatggtcttttcttccaacaagataaccattttcaagtgaaccaagcacacctgttccataaactgtatctttctcacggtctacttcataagtttgctgcaggcggattccggccggtccgtctgccatgattaaagatgggattccgtattgatcaagcagtgcttcactcgtctctcctgctgttcccggcactttaattccagatgctccaagtgtacttctgatttcagacatatttccatacataagtggaatcaaatcttctacaggaatctccgtttcttctggaaatctgcatactttcttttcttctgcctctggttcaaatgatacgttcggaagttcctcaagcagtgctgtccattcttctgcgcgtctgcataattcttctgcacagtctttgatttcaacaacttcactatgatcttccagtttctttgttttctccatcattacatcagcagatacctttacccccgctgaaagttttgcctctgacaagctgtttccaatccatattccataagcacctgcctggattctccactcctgccgctcttccaaaaagcttgcgaacgcctttgcaggaagaacaatattcagcatctctttctctcccggtttcagttcttctgtcttttcatatccgaccagacgacggaattcttttctgcttccatcctgtggaagagaagcataaatctgcacaacttcttttccgctgtatgttgttcctgtgttttctacctcaacagttactgtcacacctttcgaagcagcatttataccgcaaagtcgaatatcaaattctgtataagacagaccataaccaaatgaaaataatggttcaattccaaagctgtcaaaatagcggtatccaacatagattccttccgcatattcttccgtctcaagatttccgttcaaatagctgaactcctctgctgccggacaatcatcgtagcgttttgtccatgttgttgtcagctttccacttggtgtgagttctccaaacaatatatcagcaactgcatttccaccttcctgtccaagctgggaaatattcagaatcgcacatatattttctgttccagccagcaggtctgtaagttctaccggtccacctgcattaatgatcaatacagttgggattttctgctcattcagaaaatacagatctttttcttcctggtcactcagataataatccccttttctttttcttctgtcctttccttcgccggaaatacggcttataacataaaccgctgcttctgcagctttgatatcttcatttgtcaccgcacggccatccggcatggcaaatggattggcagcataagcatcaaacggattgtctacatgttttgcagcttctaagatctgctccttccactctgttctcgcctgctcatagcggttgtgataatctttcagccactcctcgcttacaatacccgcgtttttctcttttattccagcatatatagatacactttctctgttatttacatctccggaaccagtaccacctttaatcgtcttctctgccccaatccccaaaagtgcaatctttgtatctttttttaatggaagcagtccttcgtttttcaacagaacaattccttcttctgctgcctcacgcgcaaacacagcatgatctatttcacgctggcaaacttctgtacttcttgttccactatgtttcaaattcttttccatttacacatctccttaattcaagtcgaacatccgtgagacttggcgcgtgattctggtcagcgaagctgacatattcctatcagaatcactgcgcatcctcgcggagcgtttatctcagtcggagattggactcccgctgagacaaatttgctattactcaccacctgaagaggtgggagtcttctcgactaagataaaccaactgtaagaaaaaagctgcccactaaatgacagctttcctccaacaacttaattcttattattcttttactccaccaagagtaactcctgcaatgatatatttagacaacagcaggtatacaataatgatcggcacgattgctaccgtgatcatcatgtagattttacccatatcaaagttcatatagtccgctccacgaagtgttgcgatcaggatcgggactgtcatcttattctttgactgaatgatcaaagccggaacgaagtaattgttccaggaacctacgaaagtaaagattgcctgaactgcaattgccggcttcatgattggaagaacaatgtggttaaatgtcttaaattctccagatccatctattcttgccgcttctacaagagaaatcggaagggaagactgcagataactgtacatgaaataaaatacagccggtgatgcaattgatggaatgatcaatggaagcagagaatcatacattcccatgttcgtaaccaatttcaggaatcccattgctgtaacctgtgtaggcataacaaggattgccataataaatgtaaatgctacttttttccctttaaaatcataagcataaagtccatatgctgtcagagctgaaaaataggtacataatgctgctgaacaccctgatacgatcaaactgttcaaaataccacggaacatcgggaagcttccgtcattcgctacattttttagatttgtaaagaaatattttcccggcagtgctgagaatcccttctgtaactctgcatgagaacgtgttgcatttataatcaatacatagaagaaaaacagacacataaaagataacagaatcaatacggtatgtgccagtatgctacgtccacgacttgactttgtttttgatttcattatctctttctcctttctgcttttgctcttttcttagctgctttcttagaaccatccggatcgttatcatttgtcatacgatatacaaagaaacagaggattgcacttacgataaacagatatacagaaagtgcaccggccattccatagtttttgctcttcagatgactattcaggaacatgatcagagtcatggatgttctgttcgggttaccctgtccatttgtcaggatctgaggaacatcaaacatctgaagtccgccaataatggatgtgatcaatgtatatgccagaattggacggatcaaaggcagtgtaatatagaagaatctctggatactgttacatccatccaggtcagatgcctcgaagacgtcctgactgattcccatgattgctgccatcaacataatagttgtatttccaaaccacatcaggaagttcataaatccgatcaacgatcttgttccaaatacagatccaaggaaatcgatcggttttttcaggattccgattgacatcagaattgagttaatcggtccatttgttgagaacattgtaaagaataacaatgcaaatgcagatgccataatcaggtttggaagataaatgacaactttgaaaaactgctgccctttaatctttaatcggacatcagtgaaccacgctgcaagtaccagcgcgatcacaatctgaggtataaatccgatcacccacagaattaaagtattcgctccatatttcagcatatctgaatgaagaagactcacatagtttgccattcctataaaattcggtccaacctctttaattcctgatcggtaatattcaaagaaactataccttactgtatcgatcaacggtatcaatgagaaaataatgtatgttacgaaaaaaggaagaataaatatatatccccattttccataatcaatactttttttctttttcttcataatggttcttcctttccacaatatcttctaacagaacagaggctctgctgtcacagagctccctgcgttagtagctgttcattccagacattattctggccaaacaacctctataatgtcaggataacgttctttaattgctgtttcaaagtttgattttgctttctcaaagtcaactttgccctggaaataatcactgaatgcgttctggatcaactccacacatccctgatcgtaagcggaaagtggtgcgatcttgatgttttcagcaactggtgcaaagtactggaatgggttctgtccgccaaggaattctgaaccatatgtagcatcatcgtttgctgcttcctgcataccggattttgtatttgtaaagtctgagtaatcctgggagatctttaacagattatctttttttgctgtcatagcaaggataatgtcttttgcatgttccggattatctgtacctgttgcaacatggatgtaagatcctccccagttgtattcctgcggtgggtttgttactgcccatacaccgtcttctccatcccagttcggtttcagtgtgaaatcaataccccatgccgggaagaggaatgcaaatactttggactgacttcccattgctttgttccagtcatcattccactgaccttttactgtcgggtttaagtaacctgcatccagccattcttttgaatcattaatccactgcatgatcattggatcaactgtaacctttgtgtctccatcttttacccatgaattagaaatgttgtttccatagagacggaatgtatcagcataagaagcaaatgcataatatcctttctgcttcaattcttctgctgtctgtttcatagcagcccagtcttttactttttcacctacagcagtcggatcgtctgttccgaatacctcttttgcaatatcacgacggtaaaccattgttcccgggcagcactgccatgtagatcctctctgaaccccgtctgcatcagatgctgttgtttttgtgaagtcgtactgatctgcaagatctttatccggatcaattccaaggtccttcagtggtactgcagtgtctgcttcagcatctgtatatttgtatacatagtctgtctctgacaggaagatatctactttatcatctgtatcaacatctgcctgtttcataagtgcctcatcaagtttctgctgataaacaccatcctggtttggattgatgatccagtggatctctgttccatctttcaatgttgtaacagttccatctttggatgttgactcaacttcaggatatatagcttccagtctctcacggaactcatcattccaagaataaatgttaattacctttccttcttctgtactggcctctccgccatttccccctttgcttccacatccggcaagtgatccaacagcaactactgttgccataagaatcgcaacaactctctttttcatttataaatcctcctttatctaagcactctgctatgcttttcttgttgttgaaccaaatataccatcttttttcctccgattatattatttatcttaacaaaatatcaaattcatgtcataatataaaaaaggaggttttttatgactttatctaatgaatggtacaatacagaactcgaaaacagcgaatcagaaactcttcacagatcaccaactgtagaatattctttctataatgctgtacgctccggcgacatggaagcagtcattaaaaactgttccgaagatgaatttattcgcctggagggaacgggtgttctatcccgtaatgcgcttactaatataaaatatcattttgttgtcaccactgcaatgttgacccgttattgtatcgacggtgggctcgaaccagagcaggcttacaggctcagtgacttctatattctgaagatggattcctgcacaacgatccgtcaggttgcagatcttcaccatgagatggcaaaggattttacaggtaagatgattcttcagaaaaaagttccattttatcaaaacccgttatgcaatgtgttgattatatttacagtcacatcaaagaaagaatcacgattcaggttcttgctgaccacaccggactttccacgaattatctttcacgcattttcaagcagaatctgggagtctctgtcagcgattatatccgtgaacagaagatagaaaaagcaactcatctgctgcgatactcaaacaaatcaattgtagatatcgcaaattatcttgcattttcttcacagagtcacttcatccagacattcgagaactttaccggtctcactccaaagaagtaccgggacaaatactataaaaacatgtggtaaaatcagatttcttcacagaagaattcgcagattttcccacaaaaaatactgtcagaaagcaattctctttctgacagtatttttatctttttaatctgtcgattatactaattcaatttcaatcttatgtgtctctttcactgaaagcatctgaatctctctctttgaaagtattgtacacctttcggctgttatttctaatgcttttccatcgcaagctgctttctggatcttcaactgatcaaattctttcttttctttattatagaatataatctcaaagttccttccggcaaatgtcatcttaagtactgcttttccatcctgattatactgttccggcataagtgcaggtgcgatcttcaagtcaccgcaatctcctttcaccccaaacacttctgtgatcatggtaagcatataccagcttgcagcgcccgtcagatatgcatagaggcctcttccctgattatcaaaatattccggaagtccaggatacatcttactattatcaaattccattgctgcatctaaaagtgcctgaagtactttatttccttcttttgcaaatcctctctggtacaatgcatttgagtacataacagccatatgtgagaacactgctccattctctttctcgccataagcaaatccaaacattcttccaagatcaaatttttcctcatggaagtttgtgttcaaacggtatccgccggctttctgatcataaagatacttgtctgcactcctgcagatagattccacctgatcttctgttgccgttccactcataatggcaaatacttgtccggtcagcatcattctcacgctttcatccataacgccttctacttttcttccatggttatcataatagccattaaaccagccatcttctccatccttcacccattcgttggcacggatgtttttcatcatccaatctgcttttccctcaagattagccgcaagttgatccaatcttacaacaattgtgtctccactgatattatgttcacatttctttgcgtatcctgcaaggagtgcctgcttacgtgctgcatcttcatacagttccacgcttcctgcaagaagatcttccatctcatgtgcaatttcaatcttgctgcttccactgatttcttccaactgacggagtgtttttgcaatatttctcaaatttccggcataagcacaggtaaatgcaacactttcacccttctcccatgccatgtccagtgcatcattccagtcggcaccatgaagacgcatttcattatgctctcctacatcatagaacgcacacagattctgtaaaagaatatgctccaaaactgttccgaaataaatgtggtctctttctgttttctgcttctgtccatattcgctgttccaaagcttatcatgtgcagtacctctcatagactgcaaatctttaaaatacggaaccttttcaaacagaacatccatatctcctgtctgatccagatacagacgagtcgttacaaatggccagaatgcatgatccatccagacacgtgtaatattgtttctgtctgcaataaactcaccctgcttatttccgatgattgtcgcatttgttccatcaattcttactccgccataattatccacgatcatctgacggacgtttgagggatccataatcagaagtgcaaggcaatcctgccagagatctctccagcctcttcctccttttccataatcgtgatatggaaggaaggaacatccataaattcttcttaaaattggctggaagcaaatccacttcagataattgtctgtagcttcatcaccggtttcaaactctacatttactttttccgtccaatactttttcactttggcaagctcgttttccgcctgctccttcgtaccaaataaagtacagatttttggaatggaagccttttctcccgttgctccggcaagaacaacatactctattgattcatttgcttttaattttctgcgttcaaacctgaatgccccaacagcctctttcccctccagatggcagcctgcggtacatcccgttttttctacacgtactgcttccggaatcaggaaagaacctccctctccaataaagctttcaacagtcggataaaactccttcggtgcatttccttctgctgtaaaaccatatacaaaataagtcgtatcatttttctgatgtccacgctcatcaaaggataatactggtgtaacttctacgccacattctttcgtgtcgattctgtgaagaagtgatgtgacatgtctgtggtcgcggatattatctgcgcttcttccataaaccggaatggcaacgatcggtgttacttcctgttcttcttccgaaagatttgtaatcttgatcaactgaatttctgttgtgccatcaatagaaacaaaggatgtgatttctgactgaagatcatatttttttgaagttcttgtcaacttctgccacatcattcctgcttccagagtactttcatcctgtctgtctgtatatttatcaaactcctgctccgctgaaactccacatgctgaccagtagccttttccttctacccgacaccagaaatttctggtgccacggttattgtgaaggttttcaatgctgacaggttcgagaaggaaatgattctggtccgttttactatctccccccaaagttggtgtaatactggatttcagaccttcttctcctgccagtggtaagtaaagtccactataattttccggatttgtaatcgtaaatgttccgtttttatctgtaaaattgatttttctcatgcccagtccctcgtcatttcatttaagaaaggaataattctacctctgttgtctttgttaacttctcctgtggaatataattatctttcatttgttctccatttacgaaaagtttttcacatcctgactctgcatgccccggatttttcacaacgatatgtaaatgtgaacctctgaaatctttttcgatttcaaattcctcccactctttcggtactgacggagcaatcttcagtccatagaagtctggccgcattccgagaattccttctacacatcccaccataaccgtagatgctgttcctgtcagccagtgtacatgagaacggccgaagttcgggctgtgttttccttctgtaaactgtccatagcagtatggttcaagtcttctgatctctgcacgattattctgtgcagccggtgcattttcaataaaatagttaaatgctctctctccgtgtccacgaagcgcctctgcaagaatgatccatccctgagactgtgagaaaattcctgcattttcctttgttccggcattgtagatcacagccagggcaccttcaaatgcatgtgcatgatacggaggatccatcaggattgcaccatattctgtattcagtttgtcatatacattctgaagtgcaagatctgcctgcgcttcatttgcaagtccactgatcacagaccagctctgtgggttcagccacatatttgcctccggatctgtgcgctgtccgattacttcaccatcctctgtgaagccacggataaagcggtcttcgttccaacagagatcctggatcagtttttccagcttcttctgactttcctccagataattcagatattctgtgtctttcttatactcagcaaattccttcaaaattgtcattgcatagtagaactgtaatgcaacgaaggttgactctccatcttttccaagtcttaagcagtcattccaatcagcataaaggcctgccggcataccatgctttccaagatgattcatggagaaatctactgcacgtttcaaatgctcgtacacggtaccttcttctttatttgcaaacggaatcacttcatcgataaattccagatttcccgtctcggaaatgtatttgtatactgttgggaacagccacagcgcatcatctgcacgataagccgggtgtcctgtctcctgcacataagaagcatcatccggtgtatcctcatgtcccggattgtgtgtgaattttacaagtggaagccctccaccattatttacttgtgcagaaagcatgaagcggatcttctctactgccatctccggtgccagatggatcacaccctggatatcctgtactgtgtcacgataaccgtatccatttctcagtccacaatatgtaaaggatgcagcacgtgaccagataaatgtcataaagcagttatatgcattccatgtattgatcattgtattaaattcttcgcttggtgtcttcacctggaaatgggacagatgtccatgccagtactggatcagttcttccagttcatttctgcagattgtttcacaattctcataacgagacatgattgtttctgcatcagcatcttctttcataccaacaagaaatgctatttcttttgtctctcccggatataaagtcaggattgtagctaatgctccacatccattttcattataatttccttcacaatttaaaataccatcttccactccgaccggattgttgtatccatgatatcttccaaggaaaccttccctgcttccacaccaggaatcaacctttgcacctgcaagtccgaagaaacggtcaacaacgatcttgtcatccacatcttttccatcttccagctgatccagattggcatggatcatctgccgcacacggtttccacggaacactgttcttgtaatgaactgagagtactgaagatttacctgatcctgctcgtaattgctgttgtttgtaaattctgcatagcctgttacattgatcttgcgcatgcgatctgaggtatttgtcactgcaagattccacacttcataagactgattcagcggaacatagtatcttacttctgaatggatctggctataatcagccatcatctttgtgtatgctgtaccatgatgacattcgctcttataagaattcagatcttttcctaccggctgccaggaagctgaccaataatcttcactctcctgatctcttaagtagatatatcttcccggctggtcaaactgattgaagatatatcttaaaattcttccgttcgctcctgattttgcaaagctatatccacctgcattattagaaataattgctccatattctggagatccaagatagttcacccaaggtgccggtgtatccggtcttgtgatcacatattcttttttcgattcgtcaaaaaaaccatatttcatacttcacattctcctatcacacttattataaacaaattgcagccattcctactatctgcaattctatctttactgtgataaaagaatatcaaatcagaacacattaatatacaaaataagaactcaaaatatcaaattcgtgacatgacaaaaaggacttattttactcccgtatcagctcgcttgtataatatactcatttcatgttaagataatatcagctttatatatgaaaggattttctcatgcctggttttattttacatttaactgcagcccagatgctgcgaagccatcttcacgagtaccctgattttccttatccgattcaatctgtaaatgattttctgattgggaatcttctaccggatgcgacagaccaaaaagagctttcacatttccggaatcctgtttatcgcgataagatgatggtatttccggatttaacacgttttactgctaaatacgactctcttctttctgattccagtgttttgggctactattttcatttatatatcgaccgtcggtttttcaaggattttattccggaaattgttgatttttatgatgaaagtggacaaatcacagatataaaagaagagattgcgaccgtttatatcagaaattttcagacttatatcccttttgaaaagtatcttactgaggaatattattatggggactatacaaagatgaatacttatcttgtaaaccgttatcagattccactcgatctgaacgcacagataataaatccagggatcaatgaaattcagtatggaaatgtacagcaagtcctagattcattgcatggatatctcagtgttaccgaagatgcagtaaatgatcttaaggtatttccacttgataagcttcttgcttcacttgaacaatatacgattgaatttttatcattgtaaaaaagagcgtgtgaaaattttcacgcgcccctttttctgtataggatataaaacaaatcctgcttatatattgattttattcttttgtactaaaactctgcatcttttcttatagcaggctattccatatttcaaaatattcgttatccctatgcgcgaccagtaacattcatctatctacaatactggcggaagaaatcacactctgcatcattacacctgtctgcatctgccagcttcatattcagatggaacacatgccccaatttcttttttgttccctcgtagcaggaatatgtatacggaactttcttttctttcaagaccttctccagaagtggtgcctgctctttcaggaaatctttctctgctgtcatcagatataccggtggaaaattctctgtcacatatgtgtctacattaaccaactctaattcctccggtgtaccaccttcaggaagaagttctttcatcagattatctgtcatctcattgctcatttcttccaggccaaaatggtactgaccacaattcagggctactgcacgaatcttaagatcctgcggtatctggattccaaatttatcttcataagtttttgcatattctggatttgtacataaatttgtatacagaccaagcatatgggctccggcagaatcgccgactgcaaatatattctctgtatcgaatccatattcttctgcatgatctaagatccagccaaacacaaggttcgtatctatgatagatgccggaaattttgactccggtgccagacgataggagaaattcacaactgcgaatcctctctgtgcaaggctcatgcagtaatactgatagccttccttatcaccatagacccagcctccaccgtgcacgctgacaataaccggaagtttttcttctatattagttgcttttggacgatatacatccaacgattgccagactttatcttctccataaacaatgttatcaaatctctgaacatcttccggtgtctttaatcctgcatctcttaccatatcacctgccgcaaatgctttacggacaattgtacttgttttcatcttgttttcctttcttaaaaagagcagccgttactgttcacacgacgtgcgaccagcaatcttctgactgcccttagtatataaaacttattaacttgtaaaatttcccttacgcgatctctgtcgtactctcaaactgcgaattatacagatctgcatagaaaccgccttttgcaagaagttcctcatgatttccctgctcaatgatatctccgtccttcataacaaggatcagatctgcatctcggatcgttgataatctatgagcaataacaaagcttgttcttcccttcatcagattatccatcgctttctggatcatttcttctgtacgggtatcgactgaacttgtcgcctcatccaaaatcaggatcttcggatctgcaaggattgcccttgcaattgtgaggagctgtttctgtccctgggatacattacttgcttcttcattcagttccatattgtatccacccggaagtgtctggatgaaacgatgcacatgtgccgccttcgctgcctgaatcacttcttcctctgtcgcattcagttttccgtaacggatattgtcactgatcgtaccatggaacaaccaggtatcctgcagaaccattccgaacatttcacggagttcacttctattgaagtcccggacatcgtgtccgtcaatcttgatcgaacctccattcacatcatagaaacgcatgagcaatttgatcattgttgtctttccggctcctgtcggaccaacgattgcgatcttctgaccttctttcacatccgctgagaagtcattaatgatgatcttatcttcattatatccaaaacgtacatgctcaaattcaacatttccctgaagattctctacagaaaccggattctctactgtctgatcttcctccggtccttccaggaactcgaagacacgctctgatgctgcagctgttgactgcagcatattcgccacctgtgcgatctgctgcaatggctgtgtaaagttacgtacatactgaataaaggactggatatctccaacctcgatcacatccttaattgtcagatatcccccaaggattgccactgccacgtaacccaagtttcctacaaactgcattacaggcatcatcaaaccggaaaagaactgggatttccatgcggaatcatacagcttatcatttgtttcattgaatacttcaattacttcctcttctttattaaatgccttgatgatgttatgaccaccatagatttcttctacctgtccattcacatttccaaggtatgtctgctgccctacgaaatatttctgtgaatgtttcattacgaatccgatcaatccggcagaaagcggaagaatcaaaactgcaatcactgtcatcagcgggctgattgacaacatcatgataaatacaccaatcagagttgtaaccgatgtgatcatctgagtcgcactctgattcaggctctgtccaagtgtgtcaacatcatttgttacacgggaaagcacttcacctaccggctttgtgtcaaaatagctcatcggcatgcggttgatcttctcggagatttctcttctcaaacggtaggttgtcttctgagacacccccgtcatcaaatatccctgcacaaaactgcagattgcactgatcacatacaggcaaagaacagtcagcagaatctgtccgattttaccgaaattcattccgtctccaccggaaactttacttacaagtccattgaaaatctccgtcgttgcttttcctaaaatcttcggtccgacaatattgaatatcgttccacagatagcaaacacggctacgaaaaatacctgtactttgtaaattgccatgtagtggatcagtttcttcattgttcctttgaagtcttttgctttttcattcggtcttcgaccgccatgcattctagccatgaatctgatcctcctttccatctgtctgctcatttaacgctgcttctaactctttcctggacagctgggattctgcgatttcacggtataccggacagttcttgagaagctccgcatgagttcccttacctgccactttgccttcgtccaatactataatttgctctgcatgcaggatcgtgctgattctctgtgcaacgatcagcaccgtacttccgcttgtcttttcagccaacgcacggcggagtgttacatccgtcttatagtcaagggcagaaaaactgtcgtcaaaaataaatacctgcgggtgcttcgcgattgctcttgcaatagaaagtctctgcttctgtccaccagatacattcgaacctccttgtgaaatcgggctcttatatttctccggttttgtgtcaataaattctgttgcctgtgcaatctctgccgcctcgatcatctcatcatcgcttccatgtgaattaccaaacatgatattagatgcgatatctcccgagaacagaactcccttctgcggaacatatccaagcttctcacgaagttcatgctgtttcacttcacggatatctacaccatccagcgtaatatctccggatgtcacatcatagaaacgtggaatcagatttaccagcgtagacttaccacttccggtacttccgataatcgctgttgtctcacccggcttcgctgtaaatgtaatatcttccagaacatcttcatctgcacctggataacggaaagatacatgatcgaaagtaagtactccttttccgtcttctgggaaatgtttttcttgctttggatcgtggatcattgtctcactcttcaatacttcctcaacacggtctgctgccacagctgctcttggaagcataattgaaatcatacaaagcattaagaatcccataatgatctgcatcgtatattggataaatgccatcatatctccaacctgcatctttccatcactgattccatgtgctcctgtccatacaatcagaacagatacaccgttcatgactaacatcatcaccggcatcataaatgtcattgcacggttgacgaaaagattcgtcttcgtcagtgtgcggttcgcatcatcaaatctctcttcctcatgcttctctgtactgaatgcacggataaccggaagtcctgtcagaatctctcttgttacaaggttcaacttgtcaacaagattctgcagcactttgaactttggcataacaacaaggaacagcaacaaaactacaaatgcaatgataataaccgcaagtccgatgatccaggacatagatacatttgtcttcataacctgcagcactccaccgattgcaagaattggcgcatacagaaccatacgaagcagcataacgatcagcatctgaatctgctggatatcattcgtacttctcgtgatcaaagatgctgttgagaagtgattgaactcgttgtttgaaaatccaacaaccttatggaatactccacttctcagatcacgtcctgcacttgccccaactcttgatgccagaaatgcaaccataatacttgctaccattccaagaagagcaagtgcagccatctgacctcctgtttttaacagataatgaatctgtgtctgatccatgtccattccaaggtctttatatgcactcctgcagaagctcactgatgcctgatcaagaattgtatccggcatctctgacatctgctcttcaatcttctcaaccattgttgctctctgctcagccggaagcattttcagaagatcaaacatagacatgtcatccagtgacactgcctgggattctgcctgagattcaccttgtggcattccttccggcattgtctggtctgccccttgtggcatgctctgcgccattccctgggacatctgctctttcagcttgtcttccatctgttttgttgtatcacttccggactcgattccggatgtcatcatcattggaatctgaagaatatctttcagattctccatcgtattttcctcttcagcaacagaatctttcaagacataagcttcttttttataagaagtattatcttctgtatatgcatccatcaccgtctgttgatcgtcttccgatacaaacaaaagcaatttttccatttcttctgttgcaatctgtctcggtacttcatcttcaataccaccctgctggatccctacatttacaatatctgatgtgtaggccggcaaggacagatcacaatacgcctgcacaaccagaatcagcacgatcgcaatcatagctttccagtatgatgcagcgtatttgaataagttcttcataatctgcgtatttcctttcctggtaattctcttcaagttacacaatctattataaatcactgattctcagcgacagtaatctacttcattcactactccagattctctaagatttgcaagagcagccgacgaaaaagcatcttctcttccgcagtcattccttcaaatacaatttcttccagtttctcagctgtcttgatcacataatctatgcaatctttccctttctgtgcaagggtaaggcgcatcactctctggtcctgttcatcggcttttcttgtaatataaccttcctgctccatcttcttgatcatcgatgtaattgacggcggcgttacattcaaacgcttcgcgagttccttctgagacatggaatcttcctgatgaagggcaaataaaatacctgactgagctctgttcagatcgtattccgcatacaattcctgagctttcttcccgatcaggcgcatactctgtcccatcaatccaagtaatggggcatcctctttatgacacttcacgttcttttccctccttgattattgatacattctacaaaaaaattctgactatcacttttttcacagaacgaatagtgaaaattagttagttaattaactaaatgaaaatatagtacttttcacaaagtaagtcaatattatttctattttttcacactttcttaatactttttgcacacaaacaagttagatagttaattaaatttaatatataaaaatgatgaaaccaaatggctgacaccatctgatttcatcactccatcttaaaaagtgaacaataactaaaactctttctttttcatgactctcatactgtaaatataagaaatgaaccatacaagcagactcagcacgataagtgcaatcgcaatttcaaaatcgcctatcccttctatcatatacaaaatactttcttttaatcccaggttatccatcacaaaagagccaattgcataacaaattgcaaaaacaattaaaattgcaattggtagcactaatcgtcctttctctccttcaaaccttaaccgaattgcaatcgtaattcccgcaattgcctgaaatacaaagattgtgatcaactccattgccagcgtttccggatcaaacacttcttctggctttatgagtacagtgattcctgcacagattactccaatacaccatccacacgctgtcataataaaggaaaaaatatatttttctctaacatatacttttctatttacaggtaaagaaaataaatacatatatccatgattgttttcatcataactaattgtattccccgcatatactgctataacagatgggatatagattgcaataaaagtagctgtcttcttttccgtcagcgtaaaaaataacgccacaaacgctaacacacaaaaaagattgccaccttgccgaaaaaacaaccgaaaatccttttccaaaagtcctctgattcctttcattacatcccgcctcctgtcaacatcagaatcacctgatcgagtgatccgctttccactacaatttccggataattttctgtataatactgcttctcatttgtcagacaggcaattccgaaattttcttttctctctttcaggatatagtttttgtctaaagcctgatactgttcctcgctgactttcaacatggcatacttttcaagaattctatccatctcttcatgaagtacgatctttcctttatgaatcacataaatatcatcacacagatgctctaagtctgaagatatatgtgaactgatcaggatacttctctccggttcttcttccatatatgttctcaaaatatccagcatcccttctcttgctccaacatcaagaccggctgtcggctcatccagcatcaggaaatctgcctgatgcgtcaatgcaatgatcagattcagctttgctttcattccagttgaatactcttttaagaatttatccagtggaatctgatatctttcacacatctgaagaaatttttcttcttcaaactttggatacaatttggcaagaactgccttaacatcttttccttttaaatatccgctgaatcctgcttctgccaggactactcctatctgttctttctctttctcgcttaactcttgcggtgtttttccaagaatctttatctcgccaccatcataggaaatgagtccgagtactgccttgaacacagtgctcttaccggctccgttctctccgaccaaacctgtgattcttcctttttctacatttagcgaacagtctaactgaaattcgccgtagcttttctttacccctttgatatctaacataattattcgtcctccatgatgagttcaaacaaggagcggatctcttcctctttcattccgcagcgtcttcccttctgaatcgccgcttccagatccgcctcaacttcttttctgcgctcttcttccatcaactgtgtattcgaagctgcaacataagttccttttccatgaaccgtgaccgtcatgccctccgcttccagattgtcatatgccttctttacggtaagtgcactgatcttcagttcctttgccatcgttctcactgacggcagtatatcattttcttttaattctccggagatgatctgcgctttgatctgctccatgatctgttcatagattggtaccatcgatgaattattgattataatcttcataagcaacctcctgttgtaaacagtatataacagtatatcactgttgtcaactgttatatactgtttgttttttcaattttcagggcattgttttattgtattactccgttatccaatatcccccagcatattgtaaatcaaaacgcatcttaagatacaaaatagaagtttctaacataaaattttcatcttatatcagaaacttctttcttcatttgctctatttcattataaccttgcaatgtttcttattactaaaaaatcgccacagcctcattcacactcttcacacccagcagcttgattcccttaacatccttcaccgtcttcatgcacacttccggaaggatacacgtctcgaatccaagcttcttcgcctcagccacacgctgctccggcatattcaccgcacgtacctcaccactcagaccaacctcaccgaacacgatcgttttttcatcgatcggacgattccggtaacttgacacaagtgccatcacgattccgagatcgattgccggctcattcatcttgattccgcccgcaatatttacataagcatcgcaatttccaagattcataccaagtcgtttttcaagtactgccatcagaagattcaccctgttataatctgttcctgctgcagttcttctcggcataccaaagttcgttcttgcaactagtgcctgaatctccagaagaattgggcgtgttccctccatcgaacaggctacaacagaacctgatgcattctccggttttccactcagcatatattcggatggattctctacttctacaagtccattctgtctcatctcaaagacaccgatctcattcgtagagccaaaacgattcttcacagctctgaggattcggtaagatgcatgacgatctccttcaaaataaagtaccgtatccaccatatgttccagcacacgcggaccagccacggttccttcttttgtcacatggccaacaatgaagattgggatacatagtcccttcgccagctgcataaatacattcgtagactcacggacctgggagacacttcccggtgcggaattcacatcttcactgtacatcgtctggatggaatcaatgatcacaagctccggcttctctttctcgatcacgctgcggataatcccaagattcgtctcacacaaaagcaacagattctggctgaattcacccatacggtttgcgcgaagcttgatctgagtctgagactcttcacctgaaatatataaaatcttctgctgcttcgccatcctctggcagacttgcaagagcaaagttgattttccaattcccggatctcctcctaccagaacgagtgaccccggcacgatcccaccaccaagaaccctgtctaattctttaattccagtcttattccttgtatcatcatccgcggaaacttctgtgattggaaccactttcgcttcattcaccgctctggctgctacagtcgttcctttcgtgatgccactgtcaattctctcctcgacaaatgtattccattccttacacattggacactgaccgagccacttcgcttcctcatgcccacaattctgacagaagtaaactgttttctttccttttgccattcataatttcctttctgttcgaagcaagcgtaatacagcttgccaggtttatagattagaaaagggaaaggcgcatcttgcaattcctttccctctgtttttacactactcttgtttctatccgaatctgactgattagcatttgacaactttgattgcagcactctgatctgcgttaagttcaacacttacacttaattttccgcttaagtttgttcccatcttacctgcagactctccggcgataaatacttcatattcgctctctggctcaagttccaatgtaaactgtacgtcttccggtgcggaaactgtgaactcaacttctgtttctgtctctttgaagttctctactgtacttcccggaacagactcataaacgaacattccatttttctccagctttgtaatctccgcaaatgtctttactttataaagatctcctttaaattcaaatccgtccttctttgtcttggatgcaagagtgtaatctccaaagcttaatgttccgtcgttctctgcacgcaataattctttcactgttgccatttttaatttcctcctgggtatatatatgttcctattatatactacttaaaatagtttttctatagattttatttattcttcacatttacaattcgatgtgattttaagattctgtcttcacaaaatgaattccctttttggatgctcctgctgccacatgatccccttcctgaatctctccgttcaggatcgcatctgccagcttatcctccagttctgtctgcaatgcacgacgcagtggtcttgctccgtacttcgcatccgttcctttctccacaatgagagccttcgcagattcacgcagtttcagatgaatattcatctgtgattccagacgtttagtaaactgattgcataataaagaaacgattttcttcatctcttctttaccgagtgaatggaatacaataatctcatcaattcggttcaggaattccggacggaagatctgtttcacttcgtccatcacattctgcttcatcttcttataatcactcgccggatcttcttttgtcgcaaatcctagcttcttcggttcaacaattgctttcgcacctgcatttgatgtcataataattacagtattagaaaagtcaacctttctcccctgagaatctgtaatatgcccatcgtccaacacctgaagaagtacattgaacacatccggatgtgctttctcaatctcatcaaacagaatcacggaatatggatgtgtacgcacctggtcactgagttgtccaccttcttcatgaccgacatatcccggaggagatccgatcatcttggaaacggaatgtttctccatatattctgacatatcaacacggatcattgcatcttctttcccaaataacgcttctgccagtgcttttgataattctgtcttaccaacaccggttggtcccaggaacaggaaggaaccgatcgggcgcttcggatctttcagtccgactcttcctctcttcacagctcttgcaactgcgccgacagcctcgtcctgtccgatcactctcttctgaaggacatgctccagattcttcagacgctgggcatcactctctgcgagcttactcaccggtacttttgtccaggcagacaccacttctgcaaccgcatctacagttaccggtgggttggtcttcgcctgtttcttctcaaagcgtttcttcactgagtctaatttcttctgcactgcatcctgttctttctgaatcagggacgcttctgcaaaatctccccgttcaatgctctcttccttctgcgaagcaagttctttcactgcctgttctaactgcttcagattctctggaacctcatatcccttcagactcacctttgagcatgcttcatctaaaacatcaatcgccttatccggaagattccggtctgtgatgtaacgctctgacagctgtactgctgactccagtgcctgttcttcgatcacaactttatgatgcgcttcgtatttctctttcagaccttttaagatctcaatacactgatcctgtgtcggctcttcaatcgtcaccggttggaatcttcgctcaagtgctgcatctttctcaatgtacttccgatattctgcaatcgtagttgcaccgatcagctgcatctcacctctcgccagtgaaggtttcagaatgctggatgcatcaatcgctccttctgcgcctccggcaccgatcatcgtatggatctcatcaaggaacagaatcacatttccacaggcttctacttctgagatcaggcctttcatacgctcttcaaactcaccacggtactttgaaccagcgatcagtcccggaagatccagactgtaaatcttcttatctttcatcttctccggaaccacaccggatgcgattctctgtgctaaaccttcaataattgctgtcttaccaactcccggttctccaaccagacatgggttgttctttgttcttcggcttaaaatctccatcagacggtaaatttcctgatttcttcccacaaccggatccatttttccttctgccgcacgttctgtcagatctgtacagtactgctccatcatcgcaccgcttccgcgattatcctcctgaagttcttcctgatagatcttcggatcgatccctgctgcattcataatgctctggaataatttctgaagattcacattcaatgtgatcagaatctttgctgccacacaatccacatcacgtatcatcgcaagaaggagatgttctgttccgatttccgttgtacggagtcttttacactccttcgcgctgttctctaacagatactggagtctcggactctcttctaacctctttcctttcgctgccggatgttcttctgccggagtgatcagctcatccatcagcttcaggatcttctccgactctactccactgttcgcaagtacctgtcctgccactcctgtatattcttctctcaatgccagaagcaaatgttctgttccgatatacggatgcttcatctctctggcagctctagccgcatacttaagcgcatgctgcgccgactttgtatatgaaatctgcatatatatctcccttatgtctttctacttctctgctaccggttctcgtgcagctcatactcgtcaaatatctcatctaccagcccatgaacctcctgccgtgagatattcttgcaacgccctcgcgcaagtacgatccttaactgctctttcatcgcttcgagctgctgaagtttatctacatcaactgcgatcactgcacctctgcgtttatccagactgatatatccttcctgcttcaacacatgatacgctttgttcacagtatgcatattcactccaaccgtatccgcaagctgcctgacagatgggagtgaatccccttcctgaatatctgacatagcaataccaagaatgatctggttacacaattgaatgtaaatcgcctcatcactgttgaaatcaacttctatcagcatacgcgtagcccctttctctttcgtgtaaaacagatctcctgctgtcttctgtaaaatcgttactgctcacacgatgtgcgaccagcaacgcatctcgccattttaaatcgcctttggcgatggggcgagatgcattcaagtcaaaacacgcatcctccgtgtcaatcagcggagtgattgacacgggagtgaacagtaacgtaaaatcagccacaggagatatttcccacttgttatacctatcctagcacaacctcttgtttgattcaagcaaaaacgcagaagaaaaggaaggttttcttcctcttctcctgcgtaaaacagcactattttatttctcaggaaatataatctccattcttgttccttttccgtactcactatccacctgaactttcgccccatgcagaattgctccatgcttcacaatcgacagtccaagtcctgttccaccccgttctttcgaatgactcttatccactctgtagaatcgttcaaagattctatcctgatgttcttttggaattccgatccctgtatcactcacgcggacttttggtccttccagtgtatttcctacccaaatggttacatttccattttctttattatactttacagcattttctgtaatgttatagatcatttcatccagaatctgacggattccatgtattttcacagattctcctgtcagttccatatgaatattccgctgagccgctgtaagagaaagacgactgacaatttctctcgtcagttcaaataaatctacatcttctttctcaagctcaacagattcgtcatctagctttgatattttaataatatcttcaatcaatgtcaaaagccgacgtgcctccttataaattgtctcagaaaatctcggaatatcctccggacgcacgagtccattcatcatgatctctgcgtatccggaaatcgaagtgagcggagttttcagctcatgggatacatttgcagagaattctttacgcatattggccacagcttctttttctttattctgcttatccatagcttccaaaagcggggtcatctcctcatatacaacattatccaatgggttttccaaatccagatgaattacaggttccatcagtctgtttgtctgccattttgcaagaaaccaggcaagtacaagtccaatgattccaatccctataaccaccggcaaaatatttaatgaagtccacatcagactatccattgattttgaaacacggagaacgttcccatcatccagaagaaccgcataataatacaattctttgcttacggtatctgacatacggatcttctcgcctgttccattcttcaaagcctgctgtacttcggctctggtcttatgattctccatcgtacttccatcatttctggaatcatacagaacatctcccgtagatgcgatcagcgtcactcgcgttccctgatccacatcatccagctgtgcaagatactctgttcctgacagatcgactgcccgtttgatatacgctgcttcctgtttgatctcaccctcaaggatcttcaggttccgctgatacacaacaacagacatgatcagatatatcggaactaaaattgcaatcagtataaacatcatgcttttctgaattcgttttctcactttctcatatcctccagacttgtattacgcttctccaccgatccgatatccaacaccacgaactgtcttgaccagactgccctgctcacctaacttctggcggagtgtccggatatgaacatcaaccgttctcgtctctccatcaaaatcatatccccagatctctgtcagtagctggtctcttgtcagcacgattccctgattgcgcatcaatttctcaagaagttcaaattccttcaatgtcagcacaacttgctcgccatctacttttacttcatgtttcttcgtatctaagctgattcctccaacagaaagtttcgtcttatcctgttgctttccacttctgcgaagcactgctttgattctggaaatcagctccatcataccaaatggtttcgtcacataatcatccgcaccggaatccaatcccactaccttatcatactctgaccccttcgctgtcaccatgatcacagggatatcctttgtctttgatgaatttttcagtttcttaagaatctcaagtccatcttcccctggaagcataatatcaagcaaaacaagctctggcgtgtcaaacgccaaagcctccataaatgctgtcccatctgcgaatcctctggcttccagtccggttgtctccagagtgtagattacaagttcgcgaatgttatcgtcatcttctacacaaaaaatcatatatttctttctccttctaatgcattacagcactatccttatgcactccggtaattgcaaattctacccactcggcaatatttgtcgcatggtctccgattcgctcaagatactttgtaaccatgataaaatcaaagagttttcttccatcacgaccatcaccctcacggatcagctggatgatctgatcccggatctcatcaaaataatcatcaatctcatcatcatcattcatgactgtacgtgcaagctccagatctttctcaacatatgctgttacactgttgcgaaccattttgcttacgcctgttgccatcgctgtcagcttgtcaagattctcatccatcttctcccacttggatgaaatgatgatctctgcgatatcagaagtctgatctccgattcgctccatatctgtgatcatcttaagtgctgctgagattcttctgaggtctcttgcgaccggctgctgctggagcagaagcttcagacaaagtctctcgatatctttttcaatctgatcgatctcttcatcttctttgatcacaatcttagcctgttccgtgttaccttcctttaatgcctgagttacctttgcaattgctgtttcacacaactcacccatatgtgcaagctgtgtatccaaaagatgcagctgcatatcatatctgttacgcataaatcaaccaaacctccctgtgatgtaatcctctgttctcttatcttcaggaatggagaacaatttctcagtgtcattatactcaatcacttctcctaagaggaaaaatgctgtgttatccgatacacggactgcctgctgcatattatgcgttaccataacgatagtataatcttttttcagttccatcgcaaggtcttcaatcttagatgttgagattggatccagtgcggatgtcggctcatccatcagaattacttccggctcaactgccagtgttcttgcgatacaaagtctctgctgctgtccaccggaaagtccgagcgcacttttattcagacggtctttgagttcatcccaaatcgctgcctgacgaaggcttcgctcaacgatctcatccagctgagattttttcttgattccggcaattctcggtccgtaagccacattgtcatacacactctttggaaatggatttggctgctgaaataccattccaacacgatgacgcagtgtgatctcgtccatttccttgaaaatgtccttaccgtcgagcagaacatttccatcaatcttacaattttccaccagatcattcatacggttcagtgtcttcagaaatgtagattttccacatccggaaggtccgataaatgcagtgatcttattcgcctcgatcttcatattcacatctttgagtgcatggaagtctccataatgaagattcagatggctgatatcaaatttataatcatttgctttttttgcttccatttttattaattatcctttctacatgccagtcaacgaaatgattgacatagaaattatcagttggcttcctctttcattttctgtctttagtttcctgaattcttcttattaatgtgtcggctcaatgcatttgcgccaatgctgaacagcagaacaagaatcatcaggattgctgctgacaggtttgcaagattcggatcctgtccattgatctgaagtccccagatctgcaatgacaatgtctctgccggacggaaaatattcagcgggcaggttggggatgtcagattccagttgttccagcgcagatctgttcctgatcctgttgtatacagaagtgctgccgcctcaccaaatcctcttcctgctgccaggatgacacctgtcatgattcttgggatacacgccgggatcaacacatgataaatggactgccatcttgttgctccaagtccaagacttgcctgcaggtaatgtcccggcagaccattgatcgcgtcctctgtcgttgttgtgataactgggatcgccagaatggaaactgataatgctcctgcgagaagactttttccaagtccgaaaaacacaagaaataccagatatccaaacaatccaacaacaatggacggaagcgaagaaagtgtctcaatacagattcttagaaattttgtaagaaatcctttcttcgcatacattgccagatagattccggctgtcactccaagcggaatggagaataacaacgaaataaatactagataaattgtattgaacaactggtttccgatgcttccttttctcgcaaaggcaaacatctccggtgttgctcctgtaaatcctttgataattacataagatgcaaatccaatcaataatgtaaagaagaacactgcgatcagataaaacacgccggtcattatttgatttattccacgcgcacgttgtactcgattcatctatttgctcccccttactctttgtctttcttcggtcttgaaaaataatggatcagcaggatgaataacagagataataagaacaataacaatgccattgtccagagtgctgtcttcatctcaccgccctccgttgcatttcccatctgtgctgcgatttctgtagtcaaactctttgttgtggagaataatccctttggaagagctgttgtctgtccaattaccattgcaaccgcaagtgcctcaccgaatgctctcgcaagtccgagaataattcctgaaagaattcctgaacctgctgccggaatgacaactttataaatggactgccatcttgtagaacccagtccgtaggctgccatacggtaatcttttggcacagaatgaatggaatctgctgccacattactgatggttgggaagatcatcagtgccaaaacaatccctgccgcaagaactgaatgtccaacttgtaaatgaaatactttcttaattgccggaatcaggactgtaagtccaacccatccataaacaactgatggaattcctgcgaaaatttcaacgattggtctgtaaaacttttctccgaatttcggcgcgatctcaatcataaagattgcagaacctactgcaaatggagtcgcgatcagaagtgccagaccacatgtacatagagaacccacgataaagatcaatgctccgacagttccacccccctgtgcattatcttccgggttccagtctgtcgatcctaagaattcaaatatggaatgaccaaatatcgtaaatgtaccggatcccttatatataagaaaggctccgatacagattgtgatggcaataacaagcaaaccgcccgctgtcatcaatcctctccatgcatactcttttgtaaacatgttttgtttcttcatattttcaccttttatcagtgaaatgtactgctgttctgattttttccggaacacgcagtacatttcatagcttttcactttatgctattagtgctctgttacagtcatcttagatgcaacaccataaccaagtttctccatctgagcgccatattcatcacctgtgatataatcaaggaatgcttttgtcacttcatttggttcaccctttgtgtacatatgctcgaatgtccatacaggatattttccgctgtaagtattctcaagtgttggctcaacatcatcaattgctactgtctcaacacctgcatctcctgtcagataagaaagtgctacataaccgattgctccgtttgtactctttacatttgtaagaagaactccggaatcatctgtttccatggatgtgttagaagcttcttcgtttccgtccagtgcatatttctggaatgttgctcttgttcctgaagactcaggacgtgttacaagaacgatatcctcatccggtcctccaacatctttccagtttgttgtctttcctgtgaagatggagatcaactgctcttttgtaagactcttaacacctgcttctgcaacatctttgtttacgatcggtgccatagttacaacacagacctgatgatctacaagctcttttgctgctgtctcatccagtttatcttctgctgccacatcagagttaccgatatctacagttccttctgatacctgcttcagtccttctcctgaaccgcctgcatcgattgtgatagatacatccggataatcatttagaaatgaatctgctgcatcatcagcaagtggtttcagtgctgatgaaccggctgctgtgattgttccgcttaatgagctgtcactgctctctgtatttgtatctgctgcattatctgaagtttcgtttgatgaacttccacatccaactgccattgttgctgtcatacctgctactgtaagtaatgcaataaactttttcattttcatgtcaattatctcctttacatttcatacacatttctaatcccactgcattttctttttttattttctgcagccatttatgcttccctcaagcacagtacatatgttacgtaagaaatgtaaagtctgaaatcaaccaaatgttaagtttatgtaaaacaacaacgggtgttttttcggatttgtgcagatcctaaacggagtattttttgtataccaggaaaacactttcctgatatacaaaaaagagaggcctctcaacctctctcacaaatcatctctttatctgaagcaaacacataaggactacgcccagaatcagaccaccgagaaaacagacaatatatccaagaaccacctttcgatttcccctttcacagcttgtcttcctgatgtcattatatgaagctttctgcgaaaatattccttctaatcttcaagtgttccccttgcccaacgaatcagccatagaatactccaggtcagcaacactcccatgatcacaccgacaatattgatgcctgcttcatcccactgacagtgtcttcctacgatcagaaccttgtgtgcctcatctgcaattgccaggatcgtacaaagtccgaataccgcacacgccgctttccaggctttcatcacattcttcattgccagaaccaataatcctgattctatgaaataaacgataaagtgtgcccattttctcagatacatatgcacataatccacactgtcctgtggaaaaaagtgctgttggatccattctgccatcggcagactggttgccgctgtctgtggtccattctggcttgacaaaaccagaagaaggatcagccaaatgattgccggcaaaaatgagatcatcgtcaatttcctgttcttctctctattcgttttcttattgctcttcaaaaatctactcctaactgatatactgctttctttttcgctcattataccatgtagaaattctttgtcaaatttcatttcttgtcttacttatacgttaaacaagtaattcgcaatcccatacatctacgccactgtcctggaacacgccatgcagacgttcatgcagctgctcctttgtcacatctttctttagaatcacctgaatgaatccgcctccaccggctcctgatataaacttcccatcgatcaggtcttcacatacaagaaggatctgatctatacaggtattggttgtaccggcatccaacatgcaggataatttccaatgttggtttaaaagctcagcaaattcgtcaatatctccctgctccagtgcaaaacgcattaacacggcgactgccttcatctcctttaatgccttcaatgattctggtctgcttccgatatagccaccaaccacatcacgcagcagatttcttgcgagacgcctctgaccagtataaatcaatgcgaaacgttctttcagttctttctttccctcttccggcatttctatcttctctacaacaagattttgggcaatccccggttttgttgagatcagtttaattccttctgtcagtccgccaacctgatcctgccatccgcctccggtactcatgatctgctccataccaaggacaacatcatagatctctgcatctgtacgctcctgaccaagaaattcaaagattccctttacgcacgctcctgataagatactgcttgttccaagtcctgatcctttcggtactccataaacctgggtagaaagatagattcctcctcccatccgctttaaaatctcctgaaaatctgcttcttccttgaccgggataattccacaggcgatcaaagctgctttatgcagtgcaaatgaatcatatggattatgacaatcctggatctcagctgcactgtctacagttgtatagactccgatatccttactttcaaattccacatgaagctcatctaatctcttcaccgtgatctgtaccggataaattcctcttaatttcattgcagcattaagaactactccccccttttcattacaatgtggtggtgtatccgtccagcctccgccccagttcacgcggaccggaagggcgatatcaacctgatcttttacaattctatatcctgcactatccggaagtttcttctctgcttcttcataaattgcctcctggattgttccaaaacagtcattctcaagtgcatcataatgcagatcatcataaatcgttcttgtctttttcatataacaggagactgcatgatagattcgaatcttcaatgagaaatctgcttctactgcatcttccatcagcaacttaaagatttctttcgatattccacgctttccaaatatcttgagtgcctccgcataatacattccctgctccagttttctgatgaaacaccttgcaagaatacggttttcaagaaacctctcctgatcacaggatgcctcaatatctgctgcattaaaactggaatagaggctcatgcgttcagtctcacgccatctggaaatctcttcttttgttgcagtaccatgtgccatcttgtaaatgatttcagccatatcaagtgcatcttcccagtcatcacacaccggataaagatctgcaaaccacagataggtctcttctcctttccagagttcttctttcgtcactttattctgagccataaactgattcaatgtcgtgccgagaaatgaaacctctcccggatattttcctttcggattatctggtacaccataaatcctgattacttttttcccacctgtcagttcaattccgtgcataacaatctgttccggaatcttccggtccataatgcgcacatgggaaagaacggttccgtcgccgacctcagaattaccaagaatataacaattctccagatatgcttcttttcctatcttcgcacggcttcctacataagcattatgcgctgcaaatccttctttttgcaccgctgaattcacctgcatcttccaatccaggaactcgtaatcctgcacatcttttgttacaagacttctcaattcccttgttgtcccgaaatgaataaattccgccggtgacagacacagcagcttcattgaaaaatgatggatcgcattccagatctgtgtcctgcattcatgcagtgcctcattgagctgtccttctgctgcctctttatagaaatcttctaatatagaatcatttgcaagcggatataaaaaatccccataaaagctgatccttgctttttcattacaaaactgcctgaatttcttctcgtctactttgccccctgttgaaatcagacggaacagtgcctgcaacagtgcgctgccaaacaataccgcacctgtatcaagatctacatttcctgcattattaacagctcccatctctcgcagacgctcttccgtctgtttatgaagaaagcactttacataatcatgtccgtcattcagaaatacgccatgattttttcctgtagctaccggctctttaatggaaattgctgctgctccgtcaaactgcgcatcaatctggagtggattaaacagaagcaatacatcacctgacaaaacaagcattccctcctggattctggatggaactcctgacattcccacaataaactcatcaaataaagtggaacttcttccatccggcaattctcttggaaccggtgagaaaagcttgccgattgcagaatactgcggcactctcttgctgtcaccacctgaatgaatcacaagaattctacgattcttaaaaggattctctctctccggttcctgttctgcaatataacgcatcacctgaaatgtagctcctcctgatcccacacgttttccctccggatccggaagaaccgcatacgttgtctcttccggaagaagacctttttccagacggttctcgatctgattccgataagccgttgcctgtgcttcatttgatgctgtcaatataatataatcccatttgataaagctttttttctttaaacttctttcataatcttcccaggaatccagataggactgacgcaggaagagattattcatcttctcgtatttcatttcttaccccttatctacctttttcttatcttagttaaacgttcaaataacatccaatgctaggataacacacattttataaaattgaaagtaattgcaacccgagtagatgtttttctatatcagaacagtaaccagaacatgactttttcatatacaaaaaagagctgtaaaaaacgagattatcctctatttctcacaactcttttcaaaaatcggtttaactccagctcttactgctgtgtaaaatcattattcgctgtcggcgctactgcgctttcctgagcactgatcgactgaactgtctcagaaggtgtatacgtttctgtcggatacaaaaatgtatgcatctgtgtactcatgtcattcagtgtaaccggaacttcatagaacacaccatcaatcttaccggaatagaatacctttggaaatgcatccattgcttccagcttgtattctgtgattgtacttaaaagacgaagcacttcgctctctaaatagtttgtattaattttatcaagcatgctcttggcaatatcgatctttttcgctttgtcaagctcctgtgcttttgagaaaatcttaaagagaactgttctctgtctttcacttctcttataatctcctccttctgtataacggatacggctaaatgcaaccgcctgtgttccatctaatgtataagtaccggcttctgtaatgtgtgcagaagatgttcctcggattccattaagttcatcaatataaccgttgatatactttgtttcttcttctgtaatgtcctgctcgattccacccatatcatcaaccagttctgcaacattcataaagttaactgtaatatatttctgaatatccagatcaaagtttgtatttaatgtatccattgcaagctccggtcctccgaaagagtgtgcatgtgtgatcttatccagaccatgaccttcaatctgtacataacaatctctatagacagaagcaatatacacttttttatttgtattatctacatttaccaccatcagggagtctgatcttgttcccttaccaagattattttccctggagtcaactccaaaaatagcaaatgtctcctgattaacttccggctcttcttctacttcttccggctcttcttcctcttgtactacctgctttgtctctttctttggctcttccttttctttcttctttccacaaccggaaaaagaagcaactgcaagtgcaacaatcaaaagaactgcaagtattcttctctttttcacctgaattttcctccctctctctgtcttatctccatattgatacgaaaaagtttctcgttactgttcacacgatgtgcgaccagcaacgcatctcgccattttaaatcgcctttggcgatgaggcgagatgcattcaagccaaaacatgcctcctccgtgtcaatcagcggagtgattgacacgggagtgaacagtaacagtttctctgcatatttgcaaaaaatggctatgtttctttaacaaacacagccattttagcacactttattttagaaagctatagaaaatcctcagttctcgcccgaaaacggttctttctgacatttttcaccaattttctcacccatctttaccaatgtctctgcaccggttgcactgtttctcaccagatcttcatccgtctgcacttttcccggctctgtcaaaagaacgactgtagacccgccaaactcgaacattcctttttcttctccccggtgtacaacagatactttctttttatgattcttaatccgtccaaccataagagcaccgacttccatctgcaaaacggttcccagttcttctgtctgtacaagacaatattcccttgtattcatcttgtaaatcggagcatagtcatttgccaccggatttactgtatggaatactcctctgatctttcgctgtgcagatttcacaccatctgccacataacaatatctgtggtagtcatctaccgtgagacggattatataagctgttccaccttcatagcgtttcgcaagcttttcatccttcaaaagactgcgaactgtatactgtgtctgtttgataagaaaaagtccatcccttcgaatcggacaaactgtcactttcccgtcacaaggactgatcagtacttcttttcttccgtcaatcggacgttcctccgctaaaatcttacgcgtaaaaaagtcattataagaagaataatgtttcttttcatagattgacagatcaatctgattctttctgacaaacgatggaatcaacagcctggacactctgctgtccagcacttttccgccaagtcgggataccctggaaccaagcaatggtttcagcatcattcttgtcagtgtatgtccatagatatattccaggaatctgtcctgtcctgttgttttctccatcctgtttccgtttctgtctgcataaatcataatctctcctcttacatgaatcttcgtctcaatgtccagactactgcaaccgctactactccgactaatgcagaaagtgtcttattccccggcttttttaatttgaaatccataacaaacagaagtcctacaagaagaaccatcgcatgcagtgcaattctgaaatcacagtgcaaaaatgggcgaagcacaacaagaatcggtaatgcgatcgacatggatgtgatcggcaatccctgataacactttctgttctctgttgtctcatcctgcctgcactcttctgttacattaaaccatgccagacggatcaatcctgccaacacatagaacataagaataagaacaccgacaatcccattcattcccatacaataacagatgatcgccggtccaactccaaaacagacaatgtcacacagggaatcaatctggattccaaaacgtttctctatttctgttctatccttctttgttcttgcaatcttcccatcaaacatatcacacagaccagacagtgcaagacacaatactgcaagatccagatgtccattcaatgacagcatcatcccaccaatcgaaatccacagactgatatatgtaagtataactgtgtaatcataaacacctaacattttatttcccccttgtttttattcttatcagaataactctccatttatttatgctttcttccttaagtttcttcctattgtaaaattcgccacgatcgtgaaaattgcactgatcaataattctgtataatatccaagtcctctgcttaaaatcattcccggaatcaaaagtgcacttccgaaaaccggttcaaaaatcatcgaaaacagtttttcactgatgcccataccgcccggcagtggcagcatatccacagaaaccgaaatcacagactgcagaagaatgatcacgaatgcattcgttccggacagtccaaatgccttatatacaaaccaagttgctgtaaacagtgcgaacctctgaaataatgtaattgcaaatacattaaccagcaccatcatatgatctttcagataaaccgctgttgcatgatactgatccattgatgcattcagtttctcaattcttgtacttttatatcgcatcagatgcattttttccagcagttccatccctttcacaagaatagaacgtgcaagcaccggatgaaatacaaggagcagcatagaagccacacaaaacacatttaaacctgttccaagataaaaaatatgacggatatcatacatatgtgttctgatgaatcccctgccgaagatcataagtccaagaccgatcacaacgagaaccatcttataggtaatcgtgacaatcatcagcacaagtgttgataccgggattggaattttctctttcttcatataataaatctgcgccggctgtcctcctgttgcggatggtgtgatacagctgaaaaagaatcctacagaggaaaacaagaaacatttccatttctttagatgaataccaagcgtatgcatcatataaaatataataattgactctccccagataaagataatcacacaggcaacacccggaagcaaccagtataaattcactgttttcagaatttctgcaatctcgcttaaatcctctccatggaacactccatagagtgttgccgcaaagacaagaaagagaaaaagtacattaaatatcattttctttttattttccattttctcctcctactttacgaaccaaatttctgtaaattttccatccgtttgtccgacagcttacaaaccaggtcaactccgctaccgcaactccaccgatcacatccacaattacatgctgttttgttacaagcgtagaaacaaagaccaacactgcaatcattacagatacgatcttataccacaccggtacttttttgtctcccctaattccaatacagcagaaccagcttgccatacaatgaattgatggaaataaattcaccggttcatcaatctgatataaaaaacgcatgccctgaacaaaaattccgtttccgacaagttctggtcttacatttgttgtcggataaaacacaaaaaacagaaaacaaatgattcttgcatacaaatcagccgtaaagaatctgtattttatctcttcctcccgcaatgatacaagcagataattaatcacccagaaaatgtaacatccaaaataaacaagaataaatgccggtatcattgggatctttgtatctaatgcaagtgacaggttatggtactcaccgttatctgtcaatctcggtgctccccagtagacagctgaattcaccagaaaaacaattactggcgggagtaagatttctattattctctttctgtccaaatctcctgtcctttgtctcacttcttgttttctccattcttttcccattttatgatgtaaccggattgctccattgctatgcaattcccacaatcatcattgtatcccactttttcataataacaataggctttggcatttattaaagaaaaaagtaccattctttaaggaacagcacttttttctttagaatttcttcagaatttaccgaaaatgcatttcaggtcttacatctcgtcttccctgtatccaaaatttttcatcatataatcgctgtctctccagttcttctgaacctttacccacagcttcaaatttactttgcaatccagcagacgctcgatttcaaatcttgcagtacttccgatttttttcagcatatttccctgctttccgatgatgatccctttatgggaatctctctcgcagatgattgtagcatcaatatgacacactttgtggttcatcttcatctgatcgattgctactgcgattccatgagggatctcctcattcaagctgtgcaatgctttctcgcggataatctctgccacgatctggcgctccggctggtctgtgattgtatcttcatcatagaactgcggtccgtatgggagatatttcataattacatttacaagctcatccgtattatcgcctcttcttgcagataccggaacgatttctgcaaaatcacattccttgcgatatgcatcaataaaagtaagaacctcttccttcttcaccatatcaactttattgataacaagaataaccggtgtctttaccttctttaactgctcaataatatgcttctcacctgcaccgataaatgtagatggctctacaagccaaagtacaacatccacttcattcaaagaacgttctgcaatattcaccatatactcaccaagtttattctttgctttgtgaattcccggtgtatctacgaacacaatctgaccttcctctgttgtcagaacagtctggatacggtttcttgttgtctgtggtttatttgatgtgattgcaatcttctgtccgatcagacgattcatcaaagtagattttccaacatttggtcttccaatcagtgtgacaaatcctgatttaaaattatcctgcatactttttcctttctttttccatcttaaagtgtctttatttcaaggaacatctctttctgctcctcaatcttctcttcacttccgatcacgcaaagttcatgtgcatcaagtaatgcttgaagtacatcggcaagtgcacggatgtctgactgctgtgcatcaaggatctgatctctctcttccctgatcatctcagcagatacatggttcatataaagattcattgatctgcttccctttgctgccggattcatcggacggtcgatattactgatcgttccgataataaacttgttcatgtctctgtcatctacattgaagttcttcagataatccacaactccttcgtagatttccattgtcttctccagattcgggtcacggtaagataccagatatccctctccaatacgattgaagctgctcatgcatccgtaagctccacccttcacacggacattctgccacagataatcatagctcaagatgactttcagaatctgaagtgctcctgtatactcaacaccacggtcgataaagttacctgttcttgcaacatactgaacttttgaagatgtcttgaatccctcgttgcgtttcacacaatgaatttcacacagtgttgctgcttctttctcttctgtatgaagtgtgtctgcaatctttgcaaatgcttcttccatcggtgcaagaccatccgctgatgaagtataactgatgatcagattatccttgcggaaaatctgctgtgcaatctgtcttaagtttgcaatcagttctgctttcttctcctcaaagttttcctccagttcctttacaacctcatagtaaccgattccatctgtatcatccttgaacttcgccatcggtgaagtataagacagggaacgaagggctgctgttgtgtgcccggatgacaggaaggacatctgcagtctggatttcaacattgctaagatttctttcagacgcttctcatccccaagatcagattccatcagaatctcacgcatcatagaaaacagaacatccatcttcggatacagcgctttacctttgatttcaaatgtcgcacggaattctttctcctttacctttgttacgtctgtgtaaagctctagagaagttccgattcctcctgtgtgtacattgatctcattaaacagttcactgtattcataattctttgtattaataattccaagcacactctgcagaatgctgatatatggaagtttctcttccggaataccggacaggtcaaataaaagtgctgtgtatccaattccattcgtctcaacttcatggtgtaccagcttcactccgcttgtctcaagctctttattataaatcggtgcaatctctctggaaatatcttcgcgtccgagtacaggaatcttcgccagatcttccggtgccgactcttcttcctgatattcttccaactctttcgttgctttcacaagtgcatcgatttcttcttttgacaaactgtctttgtatgcctgaagcttatctgcaagttccttatccattcttgcagtacgtccacgctccggcttaatgatcacgatagaaccatgtgtgttatccaggagatatttctggatcagttcttcaaagtatcctgtctccacctgttcttttaagaattcaaatgtcggaattgcctgcatgtggataaatggtttcgtctcatcataaagccagctatcaaacaactgcagtccatacatcagtccacgcggataatttccgaaatcagcctcgcggaaacggaattcatgatagttgattcctgcgcgaagtgctttcttattgattccatttttcacaatatctttcaatgtatcttcaattacacgaacgaattcttccttctgctctacattcgcattcttagaaatcacagagaagatcggctgataaactccgttgtcataagatcctgagatatccttgccgaccccagcatccagaagcgctttcttcagcggtgcgcccggtgcggacagaagtgcgtaatccagaatctcaaatgccagatacagtttctcatccagtgtagtaccgatcactttattataagaaagataggtgttatcctcctcactctcttcacttgcgatggaatactcctgaacgacttccttcatctctgtgaatggcttctgcagatgaatctctgaatccaccggttcattctcaaaatctgacaaatacttctcgtcaagccatcttaatttctcttccatattcatatcaccatacaggtaaatatagctgttagatgggtgataatactttctatggaaatctaaaaattgctcataagtaagtttcggaattacctccgggtctccaccggactctacggaatacgcattatccgggaacagagagttcagaaccacgcggtcaagtacgccttccggagaagagaatgctcccttcatctcgttgtatacaacaccgctgattgtcaactctccatctggatcatccagcttatagctccaaccttcctggcggaatgtcttgtcattctgataaatatttggataaaatactgcatccatatagacatgcatcaggttctgaaaatccttgtcattgcagcttgccaccggatatactgtcttgtccggataagtcatcgcattcaaaaatgtattcagagaacctttcacaagctcaacaaacggatccttcaccgggaattctttcgatccgcacagaacggaatgttccataatatgtggaactccagtgctgtctgccggtggtgtacggaatccaattgtaaacaccttgttctcgtcatcattttccataaggagtactctcgctccgcttttcttgtgcttcagaagtgtcccctttgacttcagatcagataaatcttctgtctggagcacttcatatgcattcaaatcatatatactcattctttttctccttggtttttgttcttataaatatcaaatttttcaaagattgactattctttagtatatccgatttcactggtaaatacaaggaaagccagtggaaagaaaactttttaaaatctttttgttactataacaaaaggatgaatcccctaaagtcttcatccctttattttcaacttatatcctttttcgcatgtttcaacactttttattttatgtactcttttacaaaatcaacaacttctaaatttttttcttttatattgttatctttttccatttcttctattgtcatccaataataatgctttccatttacttcgaaattatcttttttaaatttatctggaatgtaattaaaatacatttcatataatctatgattatatactctcatctcctgatgactaacagaatatttctcctgaacccgtgatgtaatataattacatactatatcatcactattcagattcaaatctgcagcaacctgctcctttaatgcagcctcattatttctgttctgtgtcttataattcaaaaataatttacagtcccatctttcatcataataaacaagataacgcaacttttcttcacaggaattatcttttacagctaccaatgaatgattatgttgaatcatatttaactgttcaatatcttgaaacaatacttcatgatcatacttgttctttagcatctctgaaacatctttcacaattttcaagcaataaacaattccaataatacagaaaatagtctttaaaacaattccaaacccacggattcctaaaaaatcattataactagctgtaaatactgaaagtaaaaaagaaacaccggcaataattgtatcaatagttactttatttcctatgagatctcttttcttctctaatagcaatgctaaatctttttcatctatcaataatctcatgctttaccgtcttcctccttcactttcattttctaatatcaatcagtttaacacatcaccatccgccacacaagctattctttcctttataaatgttccatctgataaaaaataccctttttctccatcagctcttcataagatccagactccaatacatttccatttccaatcactgcaatcctgtccgcgtttctgattgtagacagcctgtgcgctacaattaaagttgtccttcctttgacaagtttctgtatcgaatcctggattttcttttcagaaatactatcaagtgcagaagttgcttcatcaagaatcagtattttaggatcacgcaggaatgcccgggcgattgaaatcctctgacgttgtccaccggatagattttctccatgttccgtgatcatcgtatcaagtccatccggaaattttttcaccacatcttcaaggtttgctgctcttatcacttcccacaaccgatcttctgatattttgtccgatccatatgtaatattttccctcaatgtccctgtaaataaaatcgattgctgcggtacaactgcaatctgttttcgataactgtgaagatctaacttcttcaaatctttcttatcaatcagaacttttcctttttcaggctgtaaaaatccaatcaccagatttaagattgttgtctttccagatcctgaaccacctgcaaatgctactgtctctcctggatggatttcgaagttcaaatggctgagaatctccttttgctctccttcgtacgcataactcacatcctggaatgtaacttctccctgaagatctgacaacttctcctttttccagttatcctcgacatcattttcgcaaagaacatcaccaatcgattctacggactccagaccttttgcaataatcggcagaagtgtcacgacacttgcaatttgagctacaatacttgaaaaataggtctgatacagagtaatatctccaactccgatttttcctttccaagcaatatacgccgtaaatgcgagacataacacctggaaaatctgaaatgcgacccagctgatggaagaaaaataagtctggatcatatccagttcaagtcctttttcagccactttacgaagctgctcactcattttttttgcttcctgattctccaacgcatgtgcttttgtcacgggaatcatttcaaccatttccattactttcgctgaagtttcttccatttcctttcggaaagctctgttgtgattctttatctttcccttaaatcctacaatgatcaatacagaaacaggtattgtacacagaaaaaacaggaacacgatccggctcttaaaaataacaactccaaaagaaactgcaatgttcagaataatcgtcaatagcgaaatgaaaatctgagaagccagattctgaatttgttccacatctcgcataatctttgactgcagccttcctgactgcatttctttatgatatgtaatggataactgctgtagtttacaaaccagtgcttcccgcaattccctttcaactgtgcggacggttttcgcatacagccaggtatgtatataattggtcggaatattctgaacaaaaaatacaatcataataaccgtatttaacaataaaatcctcgtaatatttccattatggtccgtcactgcattaataatattagcagtaactactggaagaacccatgttggagagtgcttaagaataaaaaataaaatggatcctgtcagttcaagataatgacctttgaataaggagatcagtgtcaataaattactttctctattctgtctgaacagatgcatcatctccgcttcttctctccaaagatcctgctctgatttctgagataatctatttttctgtctcattttcatagaatctcttaattacctcctgcaccggtttattgcatatttcataactgttatccttccacgcctcagactcggaaggcagctttggtgcccattcccataaaacaaaaccgcgaagccatgatctattcttacatgcttcgaacattgcctgataccattcgcactgttcttccaggtaaagttccccctgtaattcccagttattcggaaccatcccggaaccttttcttgacatgcatcctgcttcggcaaagaaaaatggtttctggtattttaaaacagttttttcaatccgatccagttcttgttcccatttgtcaaccggataatagccactggaagagatcacatcaacacaatcccaccagcacacattctcttcctgatatttgtccgtattataagacaccagtccatggtattcctcacggattgatgcgatcacatctctccactgcttttctctatgttctgtcatcaccatctcacatccggcaataaaaagctcacactgttctgcttctgctatccttgcataatgtgtctgaaactctgtataagacgcaaaccagttctcccattttggttcgcatggaacagcatgctcaaaaaagctgatataagcacgccatgttccatccttacaattcaccgtcggcttaagtcctacccgaattcctttttcttttgcgtaacggatcatctggatcagttcttcatccgaaaatgtgtcttccgaggtataacatatctcttctgaatgcgcagttttctgaatcccagcaggtgctaaaataacaaaatctactgctgtctgttcaatcatataatcaaaactttttcttgctgtctctgtcgaaagagaaccccttttgtgaaatggtgcaaaagtaattcctttcataaacttcattgtatccattgtattttctcctgttctctttccattatttttcatctttttctctgctcatccagcgcgcccatgctgccagtccggcaccatgcttcacttctcctgttgccacaagctcttgaaattcttttatcgaaacctcatgaatcttcaatacttctgccggatccagtgattcttcaccaagttttccacattgaatagcaaaaagatgaatcttttcatccgtagaaccaaacgatgggtaaaaatatcccagagaaatcacttcctctgcttcatatcctgtctcttcttttaattcccgtactgccgcctgctttggcgtctcgcccgggtcgatcagcccacccggaagttccgtctgccaggatcggatcggatagcggtattctctcaatgtaataatattttctccatggaacgggagaatactgaccccttccatcatctcaaggtaatcatatggtcttatatttccattgacacgcacttcatcctgtacgacattaaaacgtcctaagtttatcttttctgactttatcgtctcaaacggacttttatttaattctttttttccataattttccttctttctttagtcaagtggatattcgcaatctgtattcgatcaaattcactctgtataccaaaaggcagctgtatgaaatgaatctcacttcgtacagttgcctgctttccttatagttccgttccgtttgtctcaatcacatgtttataccaaaatgccgaatctttcatgattctctgctgatttctgtaatccacatacacaagtccaaagcggtctgagtaaccttttgcccattcaaaattatccattaaagaccactggaaataccctctgatatctacttcttctgctgcttttcccagctctcgtaaatatcttgcaagaaaatcaattctatttggatcatgcacttttccatctaaagagattacatcgtgacaggataatccattctctgtgatatagattggcttatgatatctttcatataaaaacttaggtccccactgcaaacattccggtgttaccggccattggatcgcagtcttaggaaatccttcatatcggcagacatcttgtggttttccatcttctcccattcggatacatcttccgttataaatattctgtccatagacatcgattggttctgaaatcagacgcatatcttcttctgtaattttcggaagatatttttcataacgcaccagtccctcttctggataatgtcctaataagaccggatccgaccaccaggatacattccatgtccaattactatcatcctcctgaagtgaaaaatatgcctttcttgcagcctcaatatcttccggccgctctgtttcaggataacagacagatgatgttggtgcatatccgatcgtcagtttctgttttccataagcacgaagcatctgtacagctcttccatgtgctttcatggcattatgcgccatttcaaaagtatctctcatcggtgctttcactcccggtgcatgttctccggtaagaaaaccaagtccgacaaagcactgtggttcattcaatgtaaagaaatgagttgccctgtcactaaatctttctgcaacaagcttcgcatattctccaaaccattccacaatctgcggattcatccatccgcctcttttataaatttcatacggaagttcccagtgatataaagtaatatatggttcgatcttattttccacaagttcgtcgatcagatggttatagaattcaattcctttctcattcactcttccaaatccctctggtaaaactcgtgaccaatcgatggaaaagcgataagctttcaatcccatctctttcattagctgaacatcttccttatatctgtgataatgatcacacgctacctcaccagtatgaccggaatatattttcccaggttctcttgtatacacatcccagatatgttcgcctttaccatcttcttttacagcaccttcgatctgatatgcactcgttgctgcaccccatacaaaatcctttgggaactcaacactctttctattttctttccccatagttggtctcctgttgtttagcctgtcttattatttccattcctcaattcccatattctctatgtaatcagcaagttctctcgccatctcataggtttccggaattctaagatgtcccggagttgctgctccgtttctcttaaagatgcaatgggaaattttatcatctcccatagaaacaactacatcatcaattgctttatcccaggaacagtcatgctcaagcaatgtcgtacagcagacgatcgatgctttcggatatacctgacgcaggtttttcaatagctttgagtagtgttctctccaaagaattgctttctcacacatgtaatcttctgacatgtaatcaaccggatgattatcattctggccaattgccacgacaacaacctgcggtgtatactgattaaaatcccattccgtcagtgtcccgaatgttttattgaatctgatcttattccaggcgctttccattccaacctgctccggttcatggaaccatccctgtccatccatcaatgcaattccaccctgtgcgatatcatggatctgtgcattcagcatacgtgctgtcatccatgcataagaataccaactgttagaatatcctccctgatgttctggatcagattttcctgtatagtcgactgcttctgtcacttctcctgctgatacagaatctccgtaaacttcgatttttcttttcggtgcatccggaagttccagtagttttgccccatcttcaatttcaaatccaaggatatgcatctcgtgacaagaatcctgacgtttgaagaaaaggacatgatgttctccgttttcattttccggaacaagaatctctatttcatttttcttcttattatctaaataatagcaagactgtactccatccaaaatacatccaagataattctgccagtattcatttttattctgtataaaaattttcaacgttcttcctgtaaatttaaattctgctgatgtacacggataaacccaaatcggttcttttggatttgtccagtcaatccttccactataacgtatttttttattatcaggatcaattctcatcttattctcctccacattttacagtaaacttgctgcaccgatcattccggcttcatttccaagtgctgctttctcaatctctggaagttcccccttctcaccgccaaaacatccgactttcatcatctcacgaagtggctcaagaagtgtctctccctgtgctgacacgcctccgccaaggatcacaagctgtgggcggaaaatatttacaatattgatgattcctgttccgagctttccgatatatgactgaacaacctgtaaaagttcctcatttccttccttagcttccttgaaaatttcttctggagtaaggtctttgcccgtcgcacgctttgcgtctcttttcagagctgtagcagatgcgtatgcctccaggcatccttttcttccacaagtgcaaggctcaccattttctacaattaccatgtgtcccagttcgcttccgccaagtccttttccttcataaatcttgccgtcaataatgattccaccgccaactccggttccaagtgtaagcatgatcacatcctgacactcttttccggctcctgcaacggcttcaccaagtgttgcgcaatctgcatcatttgcaattttaatcggaatcggaagataatttcccatttcttttgcaagctctacattttcccatttaatattatttgaatagcggactactccattttttctatctacagtcccaggaacgccaattcctgctcctacacactgatccattgcaatgccctgtgcttccagaagatccaatgttttctgtgcaatctcatggatcacttcttctgccggacgctgtgcatcggtatccattgtctcagatacaatcagcttctggtgaatatctaccagtccaatctttgtctgcgtacctccgatatcgattccgattctgaccggagctgctttttcgcggattgtcgtaacaagtgcatcacactgtccttctaccgtataactgccacttccggctgtcaggaagaaactgtctccctttttgaaagaaagtgtctctccgtcattcttgattgttccttctccatcaaggaacagaatgcttgcaaaggaagcgtctgacacagtaccttccattttcttcatgaaagttccatccagattcagtttatctactgtaaagtaatcacaatctgccacatgagggtaactgctcttgtcctttacgattggtacacgattcgtaaccgcaagtgctttctcgatatgcagatctcgcttcttaccatctttccctacacgtccataatcataaacacgataagttacattcgaattctgctggatctctgcgatcagaattccttttccgattgcatggatcgttcctgattcaataaagagtacatcacctttctgaaccggtactgcattcaggacatcaagaagtgtgtcctcctcaattctttttgcaaactcttctttactgatctcttctttaaatccgtaatacagaaatgcacctggctctgcatccatgatataccacatctcggtctttccgtattgtccttcattcttcaaggcataacggttgttcggatgcacctgaattgacaggttctgctttgcatcaatgaattttgtcaaaatcgggaaatcacggaatcttctgcaatgcgtaccaagaacctcttttccttctgcttcaatgaattcctccagtgtctttccggcatattttccatttgtaatataagacggtccgtccgggtggcaggaaagttcccatgcctccgcaaggatgtctccgtcgtactctactccatattcctcagccagtctgtgaccaccccacagatagtccttacaacttggttttaattttaaaatactcattactttctctccttcaaagatcctatgcaataattaatgacatcagataaaatggagttgtatccgttacatcttccggaagaattgttatatctaccgtatgaattttcttttctccatggtgcaatacattctcaagatacagacaatctccccagtcctcatcaaaatttccatctaaaagaatcgcatgttctttatctccatccaaaacaagctctgctctcgctgccggaagctggatagtttttctatactgcactgcaatgcaggaagcagtcacttcaaaatgaatggaatcccctgctttttttccgatccatccatttttaaaatgatccaggtgtcctgttttctcttctgtatccgcatggaatccgcaaagctttggtgaaatctcacgaattgtcagacgtttcgcattttcatatgcattctctgtcatttcctttggaaaaataggttcttcttcctcaacttctaattctgctttcactctttcaaggaatttttcaatttcttctgcaacaagtttatgtcctttatcattaggatgaagtccatcctgtgtaagttcttccctcgtatattcccctgccttcattcgctgataaattgtatcttttacgctcacatgtggcacctgataccagttcccaatttcattatgatattcctgcgcattcagaccagtatcataaaaaacattattcaaaagaactactgccggttttgaatcccaacttaacagctttcttacaacaccttcatacgtttcctggaaaaatgtgtcagcctcatcatttacactaaaatcaacaaccacaaaatctggttgatacattaatacatctgtcactgctctggaaactccgtaatgagaagttgtcccaccgattcctccgtttacataataaaagtttgcttttgggaatgtctttttccaccacgtaaatacacgataagcatacgtattctccattgttgtcgcaagacttccctgcgtgatcgatcctcccaaaaaaccaattgtaagttcttctcctgcctctgctcttttcatacagttttttagtcttttcaaattcacatctttcattcgtcttctccctccaactgttttctattcataaactggtcaaatatcttattgaagaaaatacagtttattctcgctgtcattgcaaatccaaagaaaaaataaaccggcattgccatgcgggttgcaaatacccctgaggcaagacacaaaaccggaatcgcattaagcaaaacaatacagattgtatatggtaaatgtttcactgcaagaacaagtgcattgatcagtgtattctttatactgttctcaaatcttgcctgcaaaggaaatgcataactaaatacgctgctgacaacaatcacgaccacccagatcgcaatcgaaaaccatttccacatatgtttcatatacaccagatcaaactgtaaaagcaccgctgccagaagaaacacgatccaaagaatcgtactctttttccactcttccttacatgccttaaaatattctttgaatacataattattctctccccgcattctccgaagaacgatccgatataaagcagtcagtgacatcccgaccgttataaccgggattgatgtcagaacaaataaaagatttaacaaaatccaatctccgacatttcccataaattcaaaaaaaggattatctgttgttaattttttcatctgcatctcctccaatcatatattctaaatacaattttgcagctttttcatgctttccatttgatggaaatacaagtaatagtttttctcctgttcctgttactttttctgtcattcgatctgttccaagagcaattcctgttatctttccattatcctgatacttttcatatgttcctgtatctatcccccacgcatctaagtcacgaaactctccgccaacttctttgcaatattcatagaaactttccgtcatgataactgcatctaattcattatttctccattgaaggaaaaacttttcatttgaactctcattcacatctgccagctttaaatctccatacgagaaattgtagtttgaattaatttcaatcctctttggatccattttactgaattttgcaaatccctctgtcatctgattgtcccgctgtgtatctatctgctggtttaccatcacacatgtaaattccggtttcttataagtcgcataatgcacgataaaaataacaatcagagcaagtactgaaaaaatgatcagcatatgataccagtaataagtcagaatgtaactgactttgtcctgacgactcatcccttctgtcttttctctgatatcatttaaaatatctttcatctttcagtccctcctctcaatgctatttttaagccgggggcaaaagccccctgctcctatattttgtaagtatggcatttaaaatttttacgcttgtaataactctaaattctttttgatcagttcacatctctgctttacacaatccggtgatctatgaggatcttccggtgtgttaaacaaatagtcttccagtttatcaattgttgtggtagccacatgcattcttgtatcagaagaagcataatagatatatacatctccattttctcttgcaattgcaccatttgtaaatacaacgtttgaaacatctcctacacgttcttctccaaatggcacaagaaatactccggatggctctgcaataacttttgaaggatcttcaagtgctgttccgaatacatacaatacataacgaagtcctgctgctgtatttcttacaccatgagcaacgttgatccagcactttttgcctttgatcggtactgctccggcaccattcttagcttccgtcagagtatggtaaattcttttactgataatcttctcttcattgatcactgcatgttcaatatcatcacacagaccaaatccgattccaccgccgcttcctgtctcaatgaatccatccatcggacgtgtgtagaaagcatattttccatcaacaaattccggatgaagaactacatttctctgctgtggagactgtaatgtcttaaggttatccagtctctcccatgtttttaaatcttttgttcttacaattcctgcctctgcaactgctgctgacaagtctgaatcttcctggtccttgctttcagaacagaatactccgtaaatccagccgtcctcatgctgtgtcagacgcatatcataaacatttgtttcctccggacatgtatccggaagtacaaccggataatcccagaaatgaaatccatcaattccgttatcactttctgctactgcaaagaatgatttacggtcattgccttccactctggctacaagatagtattttccgttcaaataaattgctccggaattcatcactgcattaattccaagacgttccataaaatatagattcgtctcttcattcaaatcatatctccaatgcaccggtgcaaactctcttgtcaataccggatatttgtaacgatcatagattccattatagaaatctgtcttttggttttttctggcaacgaggcgatcaacttttgcctgttccacataaaactgtttatgaagcatccttcatcctccttaacacttcaaagcacattcttccattatgatatggacacttccatggttcaacaatcggcttctcatccggtgtatgatcttctttcacagaccagaaccactcggaaccatttcttttatcgataaaatatttcttgatatagttccagatatctactgaggcatcaagaaatttcttatctccctgcttctgatacccgttcagaaatccgactactgcttctgcctgaacccaccatacacgagttgtgtcaacaacaccgttctctgattcatttacaagcgaatgatcgatatatgctctgttgtaaatattttctgtaattatctttgtaatcggagaaagcatatttgtatatgcttcatcgtccaagacctcaagtcctctatctaccagccatgctgtttcaatgtcatgaccataagaataaagatcgatcaaagtattccatgttctgtcaaaaaagacttcctgccggccaatttctttattgaacaccttatccttgataatatccatcataaaacggatctgcttggcaactttttcctcttttgtcacacgatataattcggtgtatgcttcaaacacatgaagaagtgtattcattgtcttttctgcaatcacaccattttctgataatttgtcattctcttccggctcaaagcttcttgtgaatgcttcaagatatccatattcatctttacattttgactcaaccaggtcatatagcttccaggcaatttccaatgcttccgggttttttgaagcatcataataagatgctaaagcataaattgaaaatgcctgattataagtatgttttgttgtatcttccggtttaccatcataagtcagcgaccagaagacacctccaaactcatcatctacacaatgttcttttaagaactgatatgcatatgccgcactttctaataaagaaggatctcctaataccatatatgcattagagaaaaaccagaggatccggctgttcaggatgcatcctttcacggcctttttatccagctttaagtcatagcttaaatatccgtagaatcctccgttttcttcatctttcagtccctgccagaatggaatcaagtcatttacaagatgttcttttatttctgtagcaaacattttctttcctccacgcatttcccgaattatcgttttccaatttctgtatccattgttgttactacactgtggtctttaatataatctacaacttcatctactgttgtaaatgcaagccctacataactgtcagcagctccataatatacagcaattcttcctgtttctgcatcatggatcgttgcacatgggaaagtaacattcggtacaaatccacgttcctcataccactcttccggagtgagaaggaatgtttcacagcgatacttcactttagatggctcgtcaatatcaaggattgctccaccaatactgtataccagaccattacatgttcctgatacaccgtgatagaaaagaagccatccttcacttgtctcgattggtgctgctccaccgccgatcttaacactctcccaccatgctgagcctcttcccattacatggcggtgttttccccagtattccaaatccttactctctgaaataaagatatcaccaaatggtgtatgtccactgtcacttggacgggacagaagtttgaatttaccatcgatctttcttgggaaaagaactgcatttctgttaaatggaaggaatgggttctcaattcttgtaaatgtcttgaaatcctgtgtcttcgccataccaatcgcagctccgtagaaatcctgacaccagatgatgtaataagtgtcttctacttttacgagtcttggatcgtatgcataaatcggcataaagtcatttccatcttcatctttgaaaggaatcttgttttcttcaaaattccagtgaattgcatcctcactctttccaagataaatataaggaactccgtttgtctgttctccacggaacactccaataaatccatcttcatatggcataacagcactgttgaagattcttgcaactcccggtgctggatttcttccgataatcggattttcattatatctccaaagtggaagtcctgtctgattgtctgccggtctctcctgccatggcatgtttggtacatttggtccgataattttcacgttactcatatctattcctccgtcttactcatctcttttaatcattaaccttttacagctccctgtgtcagtccactgtaaatctgtttctggcagacaacaaatacgatcaatgccggaagcattgtaataattacacctgcacagatatagttgtactggtttccaagcggtccagtgaatttaaacaatgatgttgccactgttacaagcctattcttatcctgcagataaaggtttgcagtatagtattcattgtaaacgcccacacctttcaggatcataaccgttacgattgccggtttcaaaagtgggaaaagaattctaaagaatactccaaaataagtacatccatccataattgctgattcatccagagaagttgaaatattttcaaaaaactgaataaaaatatagatagaaataatatctgttccacacatcataatgatgtaacccggaaggaagttgatccatcccaaagtatacatgatctgatataccgatacctgcattgcgatacccggaaggagtgatgcgaacaggaacagacttctgatcaggccgtttcctttgaatttaaatcggctcaggatgtatgcgatcatagaacctgtcaatacagatccgatcaatacaaatacaagaataatcatagagtttctgaacgcaactcccatatttgcctgtttccatgcctgcgtaaagttctcaaaatatgcccagctctgcggcattgtcattacatttgttgactgatactcttctggtgtcttaaatgctgtgataacacagacaataaccggaagtaccgaaacaaatgctccgaggatgagtgtaaaatacttaaaaacagtccatatgatttgttttgcttttgccattactactctcctcctttcgcttctgcttctgctgccagtctcttcttgcgtttcttcactgcgtagattgcttcctgctcccctacaccaaagaaataacgctctacccatttctggattgccgtcgcaatcataatcaagatcagcagtacaattgccattgctgatgccaatccaaccttctgactttcatgtgccagtttattcatgattacaaaataagttcctgttccaaatgcaccacctgtaataacatatggcggttcgaatacgctcagagaacctgtaattgaaagaatcatatttaacacaatgatcgttttgatacttggaagaatgacataacggaatttagcccatccgtttgctccatcaatcgctgctgcttcatacaatgatgaatctacagacatgatcgctccgataaagagtaccatgttctgtcccatgtacctccatacagatgttgctgctacagaaatattattaatacttgtatccttcaaccagtacggcaggctgtcaagtttgaatccacaccactgaagaacagtatcaagtacgaatcctcttgtgtagaaaaatttaaaaataaatcctacagcaataccacataccagatatgggaagaacatcaatcctttaaaaaatccgccaccttttgtcttgaaacttaaaattgttgcaaaatataatgcaagtcccagctgtacaaaagaagcaacaaagtaatacaaactaagctttaacgcattgaagcagtcctttctcgtaaatacctctatgtaattctgcagtccgacaaattgtctgcttccgatatatttcatatcatagaaactaaatccgatcatttttgcaaaaggaatataggtaaacactgtcagaagggcaagcggtaccagcataaatgtaataatacataaccggcggtttacttttccggacgtgatccactgtgtaaatgtttttttattgcccgtcattttttctcctctccttctttgttgaagaaaggcagagtctcttttcttccagatcatctgccttttccatcatctcatgacttttctcatgttctttcatgactgatttctgtcattatttatttgctctcataatcatatttctgtggtgtaactcctgcttcttcctgagctgctgtccacttctcattccattcctgaaccatctcgtccattgtcaatccatccggagtgattgcattctctacgatttctttcggaatataacctgaaacattaattccaagctctgaattattgtttatatcgtttgcaagagtttcttctccttccggtgccggatcattaatgatcagttcaacatctgcaaatgatgaaagagcttctggaagctgtgcatctttatctacggaaattccaccttctgactctgcatatcctgatttttcaacaagccatttaacatagcacattgctgcgatctggttgtcttcagaactgtttacgttaataccgtaacaatagtcagggcctgctgctgcgtactgttttccatttactgtgattgggaatggcatgtaagcaatatcgtctgaattttctcctgcgctctggatctgtgggattgcccaggaaccaagaaccatacatccaatctcgccgttgttcattcttccttttgatccttcccagtcagttgttgtaggatcttcctctgttaaaccatctttaaccgctgtgtataatgtgttgtatactgcgtatggtcctgtctcatctccattatcagagaatggattcagaccttttgttcttccttcatgagaatagaccggatctcctgttgcatttccatcaatgtaagcatcccatgcacacattgtccagtctgctgcaaagtttgtatacaacggaatggaatctgtattgtctttgatcttctgtaatgctgcgataaattcatccggtgttttcggaatttctgttacacccgctttttcaaaaacagccttgttgtaaacgatcccctgtacatttgccatggatggaattccaaatgtctgatctccatatttgaagttatcaagataattgtactgttcacttaatgtcttataacttccgaaatctgtaaagtaattagaaagttcatctttatctacagttgtaggaatcatacagatgtctccccagtcccctgtggaaagtcttgttgtcacatcatttgcataatctgtaataccttcatattcgatatttacattcggatataatttctggaactcttctacatactctttaaactttgtatctactgcatctgtcttatgagtaaggaacttcaggtctgctttgatatctgtataatcctttccaacctcaatctgatcaaaagtaacatcaatcttggttgcctcaacctttttcttactgcttccgcatccagccattgatacaatcattgctgctgccattgaaactgcgatcactttacttgcaactttactcttcatgttttttcctcctttttgttgctttttaagttgttttaatcttatcattaactttaattattttcaagtttaagtggctcttttatttcttttccacgttatgcacagttcataccatcgttttttgtatgttttaacctcttttttcgcttattcgcacttgttttagtaattaatttaattttaagcattaaattaataatttattttttaagttgtcttttaatcttatcatctataaatattaaattatgtatctttcgcaaacttttttaatatattaaaaaggctctttgctattgaagagcctttttaagcatttaaatcttttacactgtcgcgttctacaatcacgctgtcaatatatcttgttccatatcgtttttcaattccgcggatttttccgttcagaagttttaccgcacttgccgccatttgagccatatctacattgtaagtagtcagctgtctcgcaaatggatggccaaataaatagttatcatatgctgcaatcgagatgtcttccggtatccggtatcctttttccactaacagatcataaagtcgactggctgttaaatcactgttgcaaacaaatgctgtcggcatattttccggcaaagctacttctattctcccggtctttaaattacgatcttccaaaagccacccttttcttaaggaaatacctctttcttccaatgcttttctatatccaaaatatcgatccataatattttcattcgcataaatcgatcctacaaacgcaatatctctgtgtcccttttccaacacatgccttgtcactttatacatcccgatataatttgcagacacaaccgcatcacatggaatattatgtgctgcaaaatccagctggacaacgggtatcgttgtttctcttacaagcttctgtatatactgttctttgatccatcctacaatgatcagtccatctacatttttatctctgacaattttaggcagaatccctttttcttcgttttcctgtcctaatgcttcaagcatcgtcacactttggcttttcgatgccgcatatgcaactttctgatacatactccaataaaaggaaacaccaagttccaggtatttttccgcaacaatcacaccaattgtaaatccctggcttttattcgtatattttttcagatcatacccaagttcttttgccttttctaccacttgactcctgacttcttcgctaacaccttttcgccccgcaagtgcattcgagacagtaactgtactcacattcagtgcttccgctatatcttttaatttcacatttcccattttcttcacctatctcaaatcttacgttcctttacggtatttccttgaatcaccttgccttccacgattcgaattccttttggatgttttccgccttcaattcgttttatcaaggtattcacactgatatttgcaattactttttcatcgttctcataggttgtcagttctattcctttctgtgcctgcgaataataatgatcaaaacttacaatggagacttcttccggtatagaaactcctctctccatcagtttatcaagtaaagttttcgctgctttatcacaattacacacgaatccatccggaagtctctccgggagttcaacctctattttataactatatctgttctcatctctgtcagggatcacatttgctgcatctaccgttttcccccactttgtcattgctttagcaaatcccaaatagcgatccataatacttcctgttgcctgtggcgttccgacaaaagctaattcctcgtgtcctgtctttagcagcacttccgtcatctgttccattccgccgaaattatctgttacaatatagtcaatatcttctaacgtatcataaaaatccacgcacacaattggacaatcatgaaatttcttcactttatttacataagctctgttcatttcacctataataataattcctgctatatcaatgtcccgaaatatattaaattcttgctctaattcctctttcatcttgtccgcaacttcgagaatcgtcacattacctcttttggttgcttcttgtgcaacacgcttatatatgtccatataaaaagaggggaattcttttacatatctttctgctacaatcactccgattgtataggactttttcttaacctgcaccggtgtctcggatgcttcataccccatctcttttgctttttccttaatccggctgcgcagttcttcgctgactccttttctgtcatttaatgcatttgagacagttacaatactcgctcctaccgcttctgcaatctgttccagacggactttctttcttcgtcccacgtttcttccctactttctaccatttgtctgtttattctttttaccgcttaagattacgttaacattatagtaaatcactgtcaacttaatttaagttgtttttcattaaattgtaactgttcagagccaagcaaaatttcataaaacagatataaaatacttgcatttttaagactgtttttgaaattttatttggcggatacgccacaccgacgaaatgcgtagcattttggaggttggctctgaacagttactttaactttaaaaagctgtaagaaaataaaaacttcttactttctcacagctttcttttactacttattttttttcacaaaatggtacagtctgctgactgcatctccccagaagtctttaaacagatatccgcctttcatcagaatttctcctgaatagttctcttctgttccttccaactgatagactgcttttggatccaatccttgcaacttaaactttttgctcttattattcggtacaccgcgtacctggacatacgttacaagtgcttcggatttatcctttgcgacttccatgtagcaatcataatgaccattttcagagaaggaagcgattctgtaataatccccctctcttacaaggtcattgtacttatgatacatttctgtctgttctttgatcatcttatgctcctcttccggaagcttggtaatatccaactcatagccaaatgttcctgcaagtgcaacatgccctcttgtctcgaacggtgttactcgtcctacagaatggttcggacacacactgacatgagctcccattgtagacagcggatagataagtgcagttccttcctgaatctccagacgctctactgcatccgtatcatctgagcaccagatctgcggactataatataacattccagagtcaaatcttgcaccgcctccggagcagttttccagtagcaaatcaggaaattccgtaatcaaacgttcctgcattttatataggccaagcacataacgatggaataattcctgctgcgaatctttgtcaagataactgctgccaagatcacttaactgccggttcatatcccatttcacatagtcaatcggcgcacttcttaaaatctttgccacggattcatatgcataatctataacctccggattagaaagatcaagtacatattgctgacggctctgtgttgctttccgtccctcaatatgaattgcccactccggatgtactttataaagttcagaatccggtgagatcatctccggctcaaaccagataccgaatttcagtccgattttcttcacttcttctacgagatgcttcagtccgccattaatcttctcttcatttacaaaccagtccccaagtgaacagttatccgaatttctcttgccaaaccagccatcatccataacaagcatctcaataccgtctttttttgcttctcttgcaatattcagaagtttctctgtattaaaatcaaaatacgttgcttcccagttattgatcaggatcggacgtttctgatctttgtatttacttctgatcatatgctgacgatagaaatcatgaagggatcttgtcatctttccaagtccttcttccgaaaatgtcagcacaacttccggtgcctgaaataattcaccactgcgtaaattccagcaaaattcttcctgatggattcccattaccatacggacagtatcaaactgtgtcagctctgcctgcccgatgaaattaccggaatacacaaaatgcattccgtagactctgccctgttgctggtttgttcccggtgttacaagtgcaataaacggatgctcctgatgtcctgattctccctttgcagaagatacgagctgctttccataacaaatcggccggcgctggatatgacgctctctggcccaggagccatgaagtgtgagcagttcaaaattctcattatccatatccagacatgcactgtaaactttctcaagtcttacctgctgttttcctgtatttactattttcacacttcttgttattacatcttccttgtcaaacgctgaataggaaagtattaatttcagatttaagaccggatcaatacaggtaatctcaagtgtggtgacgtcctctgctcctccaaaggacgcaggaagtccatccaaggatggttttcccggcttaatctcataagattcatagaagaattcactccccatgcatcctgcttcatttctgacattaatgcagctttctctatagtctcccactcctccggacggatattctgtcggaaagaaatctaaaaatgaagatttttcacgttcatttacagacggtgtaaacggcggttcttctgttcttaacaaatagtacgcatctgtatcctctaaatattctccataatatacatgcccaacatacccttctggtgaaatacctatcaagtatgatgtattttctgtatccagcttaaagattcttctgttttcattatatgtaacagacattttatgccctccctgccgtcatagcctcctcaagtgctttcagtttctctgtcgcatcttccagtgaatttccttttactccgaaatagaatttaatcttcggctctgttccggatggacgtacacaacaccatgcattttctgaaagttcatagtataatacattcgatgccggaagtcctgtcttagtcacttctcctgttgccatatcttttcttgtatcagctttgtaatcacgcactgcaactactttatgccctgcaagctctttcggcggattctcgcggaactgtgtcatcatctcctgaatctgctgtgctccgtcaattcctttgagtgtcactgttgcgagtccttctttatagtaaccatatttctcatacatatcaaccattgcatcccagagtgtttttccctgagttttatagtaagaagcaacctcgcaaagcatcataaccgctacacaggcatctttatcccttgcataagttccggcaaggcagccatagctctcttccagtccaaacacataattatgcgctcctgtctgctcgaagaatttaatctgctctccaatatatttgaatcctgtcagtacttcgatcaatgcagtattataatcagctgcaattgcctttgccatatctgttgttacgattgtctcaacaagtgccggattctctggcattgttccgttctttgtacgctctcttaaaatatattctgcaatcaacattccagacatatttcctgtaaagcttacatattctcctgtctttgtatcttttgcgtagaccccaagacggtccgcatccggatctgtagccagaataatatctgcgtctactttcttcgcaagctcaagtgcaagcgtccatgctttctcatcctctggatttggataagcaactgtcggaaatgttccatctggtttcttctgttcttctacaacatagacctgctcaaatccaagttcacgaagcacggtacgtaccggaatatttcctgttccatgaagtggagtataaacaattttcatatcttttgctgcttctttgataatttccgggtggatactctgtttcttcagctgttcattgtattttgcatcaaaatctgtaccaatgatctggaacagtcccgctacccttgcagaatcttcttccattgtgtgcacctgtgaatactctgtaaccttcgcaacctctgcaagaatgttcttatcatgaggcggtgtgatctgtgctccatcttcccagtaaactttatatccgttgtactctcttgggttatgacttgctgtaattacaattcctgcaatgcatccaagctctcttacagcaaaagaaagttccggtgtcggtctgagactctcaaaaagatatgtcttgattccatttgcattcagacacagtgctgcttctcttgcaaattccggtgacatgattctggaatcatgagcgattgccacacctttgtcttgtccgttctgtgagagaatataatttgccagtccctgtgttgcctgacgcactgtgtagatattcatgcgatttgttcctgctccgatcacacctcgaagcccgcctgttccaaactctaatttcttatagaaacgatcctcaatctctgcttcatttccttccagtgctttcagttctgcttttgtatcctcatcaaaataagcatctgtacaccagttcttatattcctctctgtaatccatctctttacctccacttttccttgttttagcttaaattaatttcctttggcttaaatctaccatttattagtctttatgtcaacttaatttaagttaattaagtgatttgagatttattttgtgattaatagataaatcaagaggaggatttttgtataaatcttcctatcttaatagacactagccattaactctttcaatgtctttttacatttatagtttttatctataaatatattcttcatatatatattatctattggaaaactccgttcaaaaacgataaaatttatctataaaaactttgttatgagtggattgttcccatcgtttatttttcaaaaagtatacgtttaacaaaacaatctatctacaacagccatccacaaaaccaacaataaggagaacgattatggaaattattaaagatttaccggaagtatttgaagaatttgcagagcagcgtcagaaatcatttctcgctgtaaaacaattgaaagacaaaggaatccctgtggttggatcctactgtacttattttccaaaggagattgccatggcaatgggcgctgtaaccgtcagcctctgttctacatctgatgagacgatccctgctgctgagaaggttctgccacgtaacttatgtccactgatcaaatccagttatggatttgcaaagacagacaaatgtcctttcttctacttctcagacgttgttgtcggagagacaacctgtgacggaaagaagaaaatgtatgaatatatgggtgaattcaaagatgtcttcatcatggaactgccacagtcccagcgggctgaagttcttgatctctggaaagctgagattctccgcttcaaagaatatcttgaagaaaaattcgaggtaacgatcactgaagagcaggttcgtgaagcagttaagcttgaaaataaagtccgcacatccttgaagaatctttacggagttatgagacatgatcctgctccgatcaaagggcatgaccttttccgcgttctgtatggaagtggattcaagctcgaccgtacactgattgccgacgaagttgacgcactgacagccaagattgagaaagaatatgcagaaggaaaacgtgaggataagaaaccgagaatcctgatcaccggatgtccgatcggcggtgcaacagagaaggtcatcgacgcagtcgaaaataacggtggaatcgttgttacatttgaaaactgctccggtgcaaaatccatcgatcgtctcatcgacgaagatgctgaagacatttaccaggcaatcgcagagcgttatctctcaatcggatgttctgttatgactccaaacccgaaccgtctggaacttctcggaagactgatcgacgagtacaaagtagacggagtccttgagatgactcttcaggcatgccacacatataacgtagagactctttccatccgccgctttgtaaacgaggaaaaaggaattccatacatgaatgttgagacagattattcccagactgatgtcggacagctgaatacacgtattgcagcctttatcgaaatgttataatctggtaactgttcagagccaagcaaaatttcaaaaaacagctataaaatgcttgcatttttaagaatgtttttgaaattttatttggcggatacgccacaccgacgaaatgcgtagcattttggaggttggctctgaacaatcggctgttctcgtgtgagagccgactgtttttataaaggagcttttattatgaactatattggaattgacatcggttcaacctgtgcgaagacagttgttttgaacgaaaagaaagaacttatcctggaattcgttcagccaaccggatggagcagcgtagatacagccgaggaaatccgtcaaaaactggagtttgccggaatcaatctttctaatgaatcttcccactgtgtagcaaccggttacggacgtatctctgttccttatgccgataagactgttacagaagatcacctgtcatgcacttggtgccgtacatttatttcagcatcctgacctgaccgtaattgacatcggtggccaggatacgaagatcatccagattgaacagggattcgtaaaagattttatcatgaatgataaatgtgccgccggaaccggacgttttcttgaagtgatggccaacacactttcccttcgcccaaatgaaatgtttgatctggcacgcctgggttctgacacaacgatcagctctatgtgtactgtattcgcagaatctgaggtcatcggactgatcggtaaaggcgagccaaaagaaaatattgcttatgcagtagtaaattccaccattcgtaaagttgccgcccaggtcagccggatgaatggtgaaatgttcacattctgcctgaccggaggtctgtgtgaatgtgattacatccgtgaggctttatcaaaagaacttggaaaagatgttttttcctgcccggatgcccgttacgccggtgcgatcggtgctgcacttagtgcgatgaaggtacgaagataaatatccacaaaaagcacttctcagattaactcctaagaagtgcttttatacgtcttctgtttgacttaactgtttatgaacattacgtccaccatacataattcgcactacgtatactattcccgtttcatttctgcttcaacttcatctgctgaatacactctgcctgttcttttacttcaggttcgacacgtgcaaatacatttgctgttcttgctttccatttagtgaaactgcgattttctatattctctcggagtcattccataatttttttgaaaaagtctgtaaaattgtgtcctattgctaaatccaatccgttccataatttccgccactgtaaggtcagaatccaaaagaagttcccccgccttttccattgtaaatttcgtactatattcatacagagacaaccctgtatatttttcaaccgttttataaagataatcccctgaataactgaactttttctccaaatcctttctacgtacctgtccatctttttctcgaatgtaactgcttatctgatcaaacagttccctttcagatgtatttccaaaagcaaccggcgtattcgtataggcttctttatcaaacaatgcagataacatttcaatcattgctcctgcaatctgaaaatttgattttggcgttctctcctgcaggcctagtgcaattttgtcaaaacaatcatgcactacttttgtctctttcatcggaataaaatcgatataagcccgttgtgatgcctcttctttatccagttcatgtaaaaagaacttccttaccatttcatattccggtgtgagtttcccggtaaaaacacttggaaattgtagtaaattcaaaatatattcttgtgtaaactccaggaaaatcactctgcaatactcatcgaattcctccagatggcgaatattcatattcatcagacagcaacttcctttcggataaagatgtatggtattctcaatattctgatataaccttccatccgcaacatacatcaactcatagaaattatgtctgtgcatactttttccttcaagaattttgtccgattccttcttgtccatgcaaaaatatcctacatccttcggtcctataaatgtaagcacctctcttccttcttctttttccggataataggaatctaaaataaaagaaagactgtcttctgtaaaatgattttctccaaaacctttttcatacgccttcatttctttaattaaatcctgatgcatcataagacgcgtagattgaaaatacatcgtttattcctctttctgataaaaatcagttttcgtctttttatagttatcattcctgtttagcacgaatagctcttaataattgaatctgatacatataggattcaatcccctcatatatgccatttatactccatttcatattatttataataatatgaaatgatatgggtgtcaaaatttttttaccactcactagtataaccgaattgttctgttcaatagtaaaaggggaggaaaacttatgcaaaaaacagatttcaaccgtgactggaccgtgcagaaagacggctccaccgaaatacttcatgtcaatcttccagatgacgccatgatccgtgaagagcgctcaaaagagaataaaactgcaagtgcaagcgcctatttcgccggtggcaaatatatttacactaaaattttcaatctttcggaagatgaaaccagacagactctgatcttagaatttgaggctgtctatcaaaacgcaatcgtattcttaaacggtagacaggttgccgaacgtccttacggatacacaaacttttttgttgacatcactggaaaagtcattgccggaacaaatgaactgaaagtcgttgcagacaacgcagatgtcccgaacagccgatggtactccggatccggtatctaccgcgaagtgcacctttaccgttccgaaagttcttatattcgcccagaagggttgaaagtgcagattgttgatcttaatacaatccacatttttgctgatgcggttatgcagcctaatgaaaaaattgtactggaaattttcagtgacagtggcaaaattgcatctgccgaaggcacagatgtcacaattaccatcccagatgcacacctctggtcttccgaagatccttatttatatacctgtcaggctactcttctgcaaggcggaactgtcattgatactgcaaaaagctctttcggaatccgtaccctttcctggggaaaagatggattccttgtaaacaacaatcccgtccttttccggggtgcctgcatccatcatgataatggagtactcggcgcctgtggcttccatgatgccgaatttcggcgagtacgcattttaaaagaagccggatttaatgccatccgttcttcacacaaccctatttcaaaggcaatgttggatgcatgtgataaacttggtatgtacgttattgacgaagcttttgatatgtggctgatcaaaaaaaatccttacgattacgccggtgaaaagttttccaaatggtggaaagatgacattgctgccatgatttcaaaagactataaccatccttctgttgtgatgtactctattggaaacgagattacagaacttggccttgcaaccggacaggaacaagcccgtatcatgactgaattctgccatacacaggatcacacacgccctgtcacagccgggatcaacctgatgctcgcaacaatggctaaaagtaaaaaaagtatttatggcacagacgaagacggcaacgtcaaaaacagtggtaccggaggaatggatgatgctccaacctctgaatttttcaatatcatgatgaacaaaatgggcggactcatcaataaagctgccaaaaccaaaaaggcgactgccattgctgaaatcatgtccgatatttttgatattcccggatataattacgcgtccagccgctataaaattgatgcaaaaaatcatcctgaataggcaacaaccggttccgaaacccttccacagactctttacgataactggcagcttgtaaaatccatttccactatgaccggcgactttatgtggactggatatgattatcttggcgagtcaggaatcggtaccatccagtataaagataagaaaacaaagcaacctgctgatccaggtctcattatttccggtggtgccggtatcattgatatctgtggaaagaaacgcccggaagtcggatggagtaaaatcatctggggattacagaaaactccaacaattggcgttgatccttatacacgtgcagactacttccagtctctttctatgtggcgtatcacagatgcggtagaaagctggtcctgggaaggctgtgaaggtaaaaaggcatctgtaacagtctactccgatgcagccaaagtagaactgtttgtcaatggaaaaagtgccggtaaaaagaaaacaaaaaaagatattgcaaaattcaaaaaaatcccatatgaagccggaaaaattgaagccgttacttatgactcctccggaaaagaaacaggccgcacctcactgatctctgccactggaaaaactttgataaagcttactcctgaggcaaccagtctctgcgcaaatggtcaggatctctgcttccttaatatcgatcttatcggggaaaacggaatcacaaaatcttctgtcgaccagaatctgaagatagaaatctccggtcctgcaacccttcagggctatggctctgcaagaccgaatattgaaaaaagcttctgcagtgatactttcaagacattctacggaaaatccttagccgttatccgggctggatatgaaccaggtactgtcactgtaaaagtttccggaaaaggattagacacacaaaaacttacattaaatatctgctgaaactctacagatttctaaataaaatcaagggagaacatcagaactctttttccgttctgacgttctcctttcggtcatttttctaatatagttgtgctacttgaaaatcaattgttatgttctaattatcttttctctattaccgttattatgcaattttattctaaaactccaatcgaatctgtctgtcaatccaactttcctgctttgcctcacgaacaatatcacccggcatatgtccaccaattagaaaaggagatgcaggattatgctttctcatattttctttgaccaaaacaggatttacattcgcataacagtatttacacaaatgtccgcaagtatcataggcacctatatctgtccccaaaaggcacgcacattccccatttctctgatttttctttctctttggaacttccagtctgctatggagagctgtctcaaatgtatgaacagtcatacacccggagcaatctgcaccatattgggcaagctcttctccttctgcacaaggcctcagaaccattccatactttgatgctatttttacaaatgcttttcctatcatagcccggtcttctgcccgtactgattttgcttctggaaaattgcgttccacctttttataaatatctataaagctgattacacatgtctttgtgtatccggcaagattttcagccattttttcaaattcagatatatgccactccacagaatgttttttatctataaaaatcggatcatatctccatccaatactgtctacgcccacgacatccgacaatttttttaaaccttccatcacagtttctttatccggaacgtttggctcaacatctcgtccgtaaggcgtaattgttacaaaccagtattgaccatacggttttaacttatcaagaaacggcagcattggaagagggttcttcgtgcagaatgcgatcagatccacaacttctggtgaaaggctgtatttcgtcacctgttttggattatagggattcctcacgcatacatatccatcttttatccgattcaaaaaccatttcgaataaaatgcaggtatatctgttctcattcctgtttgtattatcattttatcataccctcttttgtcactgttcactccgttcacaaccgctctttatcacaagtctacagttctttcagaatctctccaatatcttcattcatacaaacagactttctcgttatttctgcaggtgcatatgcttcactctggttcaaacacacataaaatgcatgttgaaatttgtttgtcatctgccaaaacggatattttataataccaggagtattatatcctacaccaagctccaggaacaccattttctgctttttatgttcctgtataaatctctcatatctttctgctgcctgatgccatccttcatcttcaacaaatgtctgatccgctctgagattcatactcatcggcttaccgcaacgtggacaatatggaatcataccagacggaaccatacgcttaacttctccatcttccggtttttgcagttctccatcttttatctgaaatccctgactcagcaccatttttttaattgtttcttcattgtcataagtttccttatgacaaggctcactacattgaaacagaccataatctccctgtgtataaaagattctgtttttatcaaagccggctttctggaaacaatggtccacatttgtcgtcagtacaaaataatctttttcttttaccagttcatacagattctgatataccggttttgacgcatccatatatcgattgatatagatatacctgctccaatatgcccagtgttcctctaaagtcgcatagggatagaatccacctgaatacatatctgaaaacccatactttttctcaaaatccgaaaaatagtatgtaaatctatctccggtatatacaaagcctgctgctgtagaaagccctgcccctgccccaactataactgcatctgcctgtctgattttttcttttatctgtaatatcttatccgagtaactgtttgtagagtcgttcatcttcctctttaaaaacattaaatatcacctttatctttgattttgtcttttctttatattgctttactgtctgtactgcaagctcagcagctcttttatttgggaacataaacacacctgtcgaaatacaacaaaaagcaatactagtcacctcattctcatcagcaatcctaagacatgattcatagcaggatatcagcaaacgctcatgtttctttgtcagccttccctgcacaattggtccaactgtatgaatcacatgctcacacggcagattaaacgctggcgtaatctttgcctgccctgtcggttcttcatgtctctgttttatcatcatatgattgcaatagtttcgaagctgaattcctgcacaggtatgaatacaattatcaatacaattatgacaaggctgatagcaacctgtcatgccgctgttggctgcatttacgattgctcccactttaagtcttgtaatatcacccttccagatatacagatcaggctgcacctccccgatatctgccaatgtgacaatccctttcttctcattttcttccgaaagatacgcatcctgaatctgcaaaaatgcaggatcaatttcctccggcattcttatattcataagcgatctgagtaacattttctgctcgcctgcatctgatggaatctgcatgttctcatactccggtcgctctttcaataatccttcaatcaaatattttcttctgtcatcctgattcatttcctgatcaccgctttcaccggacagttttcataacagtttccacagtgcaggcagtgctcctgccgtatgacaaaaggtgtctctttctcaatacatttctgtggacaatgtttcatacatgttccacaaccaatacaggattctgttatgtaatatcccttttcttttatattaacattccccagaatatatgtctcccgaaaaattggattcacaccaagattaaaatactccacttctgcctgatcaatacagaaaataataccgatttctcttgtatctcccggatatacattcgcaagatatggctgttctttaaaaatgagattcatccattctttctgttcattctctgctactgcataagcctttcctgacaaacggatcatttctttgtatttcgtataggcaagaatctgaaccctgccatcttccattaattctttgcaaaaatttttacctctggcggtaaagaaatagagtgcatccggttcgtaatgaatggcactgatatttcgtatctgtggtgctccttcactgtccactgttgcaaacgcaagcactcccaccagttgcatcttctttaagcatgtttgtaaatccattttatcgctcctccaatatctctccggtaatctcatttcttgtcttccagcactgtggatctgccccataaaagttaccgcttgttccattggcaactgccggacatccacggcaccatgccttaagttcacatttgctgcattttacaaatttatcgtaatctctgtatttttccatctgacagatccagacgtctgccagtcggtcttcaaaaatattggctactttactgtctgtcacccttctgcatgccataatatctccattcgaagatatggtaatatgacagtttccacagttacagccaccatagatcattcctgcctctgcactctcaggaagcttaaactctcctgtttcatattcatacagcgtccacaaatgatcctttttattaaaataggtctcacatcctgccttttcatatgccttatactttgcatcacagacttccagaagttttctgtattcttccggtgtcatgcttgtgtcaacttcaccacctgtaggcacatagcgcgaaaatgcaaagacctttactttcgcttttacaacttcatcaataatatccggtatctcttccatatttgttttggataccgtactcataattacactttttattcctgctctgttcagacatccgattttctcaatcgtcaggtcaaaacttcccggctttctgaaccagtcatgcgtttctcgcattccatccaaagacatctggtatttatcgcaaccacacacctttagcattctgcaaatttcgtcgttcaaatgaaatggatttcccatcaatgtaaatggtatgttttttgattttaacaacaccatcagtttccaaaaatccggatgaaggataggatctccgccagtaatataaaaatatgggattctgttatacactttacagaaatcttcacagttttctaccacttctttcatctgtttccaagtcatactcttaagctctttgcagccttcacctgaaaatatatagcaatgtttgcaacgctggtcacactcatctgtaatatgccactgaaaagaaaaatactgactcatcctatccaactccttccttaactaattttacttgtcagatgctccacatgctgttccgcatgctgctggttgtctacgctccgcttcggtccgctcagagcaatcgtccaccggacgatttgagccttccggtttgtctgctgctccacacgctgttccgcatgctgccggtttctcttctggcttgtctgctgctccacacgccgttccgcatgctgccggtttctcttccggtttacctgctgctccacacgctgttccgcatgctgcactagtttctgtttctgctttctttttccatccaaaaagatttgacaatgacattttgttacctcctgatatttttgtttgttgttatctttgttgcaagattataatatcaagagttcttaactgacaaaagtacgcacttttttattacatagatataaaaaggtaaccctggttacttttttgtaacctattgcttctttttgtctgttacattaaaattaaatataacaataaaaaaggatgttatattaggaggcgatcatatgttaacaaaagaagaattaccggaatgtcctgtagctattactgttggattaatcggaagtaaatggaaattactgattttaagaaatcttcttacaagaccctggagattcaatgaattgaaaaaaaatcttgatggaatcagccagaaagtattaaccgattccttaagatccatggaagaggatggactcatcacccgaaccgtatttcccgaagtccctcctcatgtagaatatgctttaagtgatcttggtgaaactatgcgccctattttggatgccatgaaagaatggggaacttggtataaggagaattgttaagagggaagctgctttcacttgcagcttccctcttctacaccatcgcataatcctcaatattcgttattcctgaaatgttttcaatgcatcaattgtcctctggatcagttcatccagtgtccatccaagcatctctgcccctctttctatcacttctctggagcagccggcggcaaatcccttgctcttatactttttcttcactgactttaactgcagatcctgaacgcttttggacgggcgcatcaatacaaccgctccgatcaacccggtcagctcatctactgcataaagtaccttctccatctcatgatctggttttatatctacggtaatcgcatatccgtgacttgctgttgcgcgaacgatcttctcgtcaatcccgcgctctctcataatttcctgtgattttatacaatgttcttctggaaattgctcgaaatcaagatcatgcagaagtccgacgattccccagaattcttcttcctcgccatagcccagttctctcgcgaaataacgcatggtattctcaacgatctgcgcgtgttccaaatgaaatgcatctttattgtattctgttaataagttccatgcttcttctctggtcatatcttctcggtcctttctttgtgtaaaacagtttctttgctgtttgtttttcacatcataacacacttttcttttatatgcaattcctatctgttttgtatgttatacattctactggtctggataaataaatccaaacaaaaaataccctggaacaggatttaaaaccaatctgttccagggctacttatattctttcacttatattcttttatttgtaggttttctcttcgtctattatctgattctgaagatcgggctgatcttcttgtagatcagaaatacaacaagtgatacaacaattcccttcacaaggttgaacggtgctaccgcaaacataacaaatgtagaaaggcttgtgatatgtgagttaactgctgttcccataccaaccagtgcatcaatcggcattccgaatgcttttgcataagtcggaagaagtacgaatccattcacgaagcatccgatcacgatcattagaagcgttcctgttgccattccgatcagagcgctttttcttgttctgttttttctatagatcagacctgccggtacacagaaagaacatccgataataaagtttgcaatttctccaacacctgctgttgatgttcctgtcataacaaagtttaataagatcttaacaagctctaccagaacacctgccataggtcccattgcaaagcatcctaccagaaccggaacttcacttaaatcaatcttataaaatgtcggtgcaaacggaagtggaatctcgaacatcatcagaataattgcgattgctgaaagcattccgatctgaactaatgcctttacccccagcttcggctgaatcttcgcatctgcgtttgttagtgtctttgtctctgtactcatagtgttactctcctttttctaatccgctgtctttatcctaaacagcattttttctttttgaaaaaggtaatcttcacaagaaaaaacccggaaggtaattaccttccgggattcatgttttctgctcttagtggcattctcgcaagattctcaggcaatcagatatcatattcgaatatctctttttctgattctgcgggcatgaacttcttctctcatccagactttactgtcggtaccggaattcccattctgtaatgccatcacagacgagtcaccagttcagccgcatcatatgcgggtcgcggactataccgccggttgggacttgcaccctaccccgaagattaaattccttttactcttactactatagcgcgctcttactaaaaatgcaaccccttttattgatatttaatatcattttgcgccgtaatcgataccacttatagcactttcgactaatatattgatattccttttttcctactaggtttgttgtgttcttaataaaatttttcaataatgttcattttcggttcaaaagttcatcacacttttttcacaaaatacctctatactataagtgttcttaaaaagaacactttttcataaactttttcccccttgagtcacagagatgtggctcattccttttatataaagaaaaatcctgtcttctcgacaagattttctcatacattctttatagaatacgttttctccatttttcccatagggttccctgaacatactgataagctttatcataaaccaatattgctatctgcccaaccattacagctgccaaaagcaattgatctgacactgctttctgaaacagcatcgagcgaaatccgaaaagacacgggagatacaccagattaaagatcacatattttacaagccagtaaatccccatcctatgtcccatctgtggtcttttcgcaagaaatatccagactgcttcaattccaagaatatagaatcccatcgcagcaaatgtaattacataaaatttgttcggcgtaactaggaatcctaataaaattgctgccagataaaaggctgcccctgtacgaaggccgaactcacgaataacaatccctacaaaaaatgccgctgctgccaacaaaaacaatgtatttgtctcgatcacgcttccaagtgccatacacacaacagtcaccgcaaggatcaaacctccaaatgccatttgttttgcttttacatgcatgagcagagatcgcctcccatacattcacacaatgtgtccgcaagccataagtcgcaacacatatttcctgtaccacaggaattctgtcctcccggtgcatagccgccaccatacggactgttctgataccttctgctattgaaatccaactgattcaacagctgacgaaactgcagattgtttggttccatatttactgcctgtgccgcgtgatcccttgccagaatctgatttccgattcctgcattcgcacagccactcagataataccacatcgcacttctctgctgaacctgatccagtgtattgattgcctctctataacgtctgctgttaatatagttcgcagctgcctgcagtttgggatccatcgttccatagccataagagctgttctgatttccataagactgatttccataagaataactttcagaagaaccatatccataattattcccgtacgaatttcctccattcgcacgctctctcatgataatatcatacgcttcctgtacttccttaaacttctcttctgcaagatctgctaacggattgttcacatttgcatccgggtgatattttcttgtcagatcccgatacactctctttatctcatcatccgacgcattcggtgacacaccgagcacatcatatggattttttgtcatcattcttttcctctcttttcttcatctgaatcttattgtaatgattccagactccatcatataatatatttcttaaaatgtctacgtcaaccagacatggcagttgttcaaaacggactgtgctctccgctatcatcatccgaagaatctgttccatctgcacctcataatccggccgctttgccagttctttcaatggattatagcgattcttctttctatcttccggcagatcctcataggcatccatcagataaatgaattttccgagatagaatcccatctttctgagcgtcttctcccagatatcctccttccagacaaaaagctccgccattaatctgccaaaacatcctgctgcccggtcaatatccatactgttctcatgttcacattctccaagttccctcaaagactgctgaatcaccttgctctgccgcggatatttctctatgattttctttgcttttccctgaatcaggctcttcgtcatcagacttgacactttatgatcatcctgccagtcatcttccatatgataatatgcaagtagcacattcatcgccgccgcataagatgtaatttcattccgcaacatatgttgccgcttcactggatgaaccttacagcggtgttcctcatgtttcgcaattgtctcatataaagaagataacagaataactgcaaatgtcatatcatacgtcaatgtcatctgccccataaatccataatcttctttcaatgtccggcaaagtccacaataatatgccctgtatttcttcagatcttttacttttaattccggttcacagaccgttacatatccaaacatgcaattcctttctcttctggcaattttcctgactttatctattctaccttattctttccattttgcctatcacatgtctgcaaaattaataagtttttaattgttaacctttttatattttatagttgacaattaacttttcatgaattatactaacgaagaactcaatcgttgccatatttcagacaacgatgttaaagctcgcttgaaacagcgataagtattaagatctaaaggagtaaattgaaatgtcacagaatgaaacttccggcacagttgccgtagacaaccagaaaataagaacaaaacagatggtactcatcgccctgatgactgcagtaacctgcgtcctcggaccactttccatcccgctgccattcagccctgttccgatttcccttacaaactttgcaatcttccttgcaatcttcgttctcggaatgaaatccggaacaatcagcttcatcatctacctcctgctcggagcaattggtgtcccggtcttctcctctttccgtggaggtctccaggttctcgcaggaccaaccggtggatatctgatcggattcatcttcctcgcactgatcatgggatttgcactcgatcactttgaccgtaagctcgttcctacaatcatcggaatgatcatcggaatggctgtatgttatgcattcggaacggtctggcttgcaaaacttttaagcctctccttcaaagaaggtcttatgatgggtgttatcccatacctcgcaggagatgcagcaaaaattatcattgctgcaatcgtaggaccaaaactttacggtgctacacagaagataagataattgaattgttcactgaaagaaacatccaaactaacctccatcggtttctgtttggatgtttctctttttatagacaatagtcggtaacgagcctacggatttattcccaccgtttttgggaatagaaaaccccagagttgccgctctggggttttcgcgcttgtagtcaaatcacatgaactactcacttctctttgcctatcggcattatagcatattcactttaacaatacaatatacaaaattattaaatccctctcatcgtcagctgaattctcttcttcttcaaatccacgctcatcaccttcacatccacaacatctccaacacttactgcttccagcggatgtttgatatatctgtctgtaatctgggaaatgtgtacaagtccgtcctggtgaactccaatgtccacaaatactccgaagtcaattacatttctcacagtacctttcagcaccataccttccttcagatctttcatctcaaggacatctgtgcgaaggattggctttggcatctcatcacgcggatcacgcgccggtttctcaagctccttgacaatatcacgaagcgtaatctcaccgattccaagctcttctgcaagcttcttataatctccgattgtaagaccaagtcctgtcagctgatgtgctgtgatagcatctgcttcgtacccttgcttcttcaacagcttttctgctgcagcataagattccggatgaacacctgtagcatcaagtggattcttaccttcggaaatacgcataaaacctgcgcactgctcgaacgctttcggtccgagtttcggtactttaagcaattcttttctgtctgtaaaacgaccgttttcttctctgtaagccacaatattttttgcgattgcactgctgattcctgagatgtaagaaagtaacggtgcagaagcagtatttaaatctactccaactttatttacgcaatcctctacaactccgtttaaagactccccaagcttcttctggttcatatcatgctgatactggccgacaccgatggatttcggatcaatctttacaagctctgcaagcggatcctgcagacggcgtgcgattgatgccgcgcttctctgtcccacatcaaatttcgggaattcttctgttgccagcttacttgcagaatagacagatgctcccgcctcattaacgatcacatactgtaccttctccggaatctctttcagaagctctacgataaactgttctgattcacgggaagcagtaccatttccaagagagatcagagaaacgtgatacttcggaataatcttcttaagcagatccttacttgcctggatcttcttctctgttgtcggtgcagtcggataaataacggttgttccgattacctttcctgtctcatcaacaactgccagcttacatcccgtacggaaagccggatcccagccaagcacaaccttgcctgcaatcggcggctgcatcaggagctgatgaaggttctttccaaacacttcgattgccccgtcttctgccttttctgtcagttcgtttctgacctcacgctcaatagccggtccgatcagacggttgtaactgtctgcaattgtctctttcaataccggtgttgtataaggattctctgtacggatcacctttctctcaagatatcttaaaatatcttcttccggtgcttccaccttcactgtcaggaatttctctttctcaccacggttcaatgcaagaattcgatgtcctgcaagcttcgaaactgcttcttcaaactcataatacatctcgtaaacagactctgcctccggatccttcgcctgagaagtaacctttccttttctcattgtcgtctctcggatccaggttctgtaagctgcctcatctgaaatgctttctgcaataatatcacatgctccgctgattgcatcctttgcactttccacacctttttcttcggaaatatacgcttccgctgtcttctcaagcggctcttttgtcttctgcaatgtgatcagtgcagccaatggctcaagtcccttttccttcgcgattgtcgcacgggtacgtcgtttcggacgatacggacgatacaggtcttctactgccacaagtgtttccgctgccagaatctgtttctttaattcttctgtcagttttccctgctcctcgatacttgagattacctgttctttcttctcttccagatttcttaaatacaccagacgctcatatagctttctcaactgttcgtcattcagttctccggttgcttcttttctatatcttgaaataaatggaatcgtattgccttcatcgatcagctgtactgccgcatcgatctgccagcgttttacatccagttcttctgtcagtctctgattaatatccattctttttagtcctttccactttcataggcattctgtacctgttcggtcagctcttttccgccgttcgcataccattctaccacaaaagtatcaaagtaatccactggtttctccccactgataatctgaagaaacgcttcattctccagttcttgtaattcctgcgggatttcggcatttacgttttccaaaggcagtgtctgtgcacttcgtattcccgctttctgcagttcccccactgcctcaattcttgatgcataagctgcccagccatttgccgttgtcaactgtccattcaaaaatgatttacatgtatcataataagatttttctagtccactcaattccgacacatcaagcgttttgtccaacgctgcctgaatatgttccgttgtccgataaagtgcatcctcataatccacattaatattcagcggacgggccgtcggatctacattaatggaaaaatagtcattcacctctcttgctgaagcatcatttgcatatctggactgatcaaaaatagcactcacatactttgctacaatttccggatgctcatatcctttgcgtaccaccacatacatccactggtcatacgattcaaaaactgatatcttctgtgtctcattcacttgttctttgtctaaaagatacggtttccactctgcatttgaatcgacactatatgccgcactaagcggattattcggagcccaccaacgtccgtagattgctccgcaatgtccggtttttaacagattatctatgttttccgtctttctcaacaagaatctctggtcgagtatcccatcctcatatagattacgaagctttgaaagtgcttcttttgtttcctgtgttactgacccgtaaactacatctccactttcatccagaatccagtgacatggcattgcacctgcatgtataaacgctgaatccactccataagtctggtccgccccggcaatcacatctgtactacaggcaagaccaatcgtctgaccgtctcctgctgcatcttgttctacaaatgcacgcactatctccaacgcttcttctaccgtttccggttccttcaatcccaacttcttaatccagtctttcctcaaccagagaagtggagctccgtcatcaatcaccgtattcggaaatgcatacaactttccatcaactgttgcagattgtaagagagaatctccataactgtcatacatttctttgattgtatctgtcgtacactcttcataagtttctgtgaggtcttcaatcatacctgcttcaatcaggcggagcaggttatctcttcccttcacgacaagcacatccggaatatctcgatcttcaatcgctacattgactgcctcttcatacgtattgccatcctgcaattcaaagacatctgcatttttaatattaagcactttcttcagatatctcgtatacgcattgttttcgtacgtatttcccaccgggagattcgaattatttgctcctgcaatcttgccaagtgtatacgtgactgtctcaggatattttccaagcggcgtatgcattgcttcatacatctgttttcttttcccttcagctgcttcgcctgcaccagactcactttgagatgcatctgactgttccatctgtctttgactttcttttgattcaaaacaagttccgcaccaaagtatcatcaacaaaattaatacaagctgggctgaaagaattcgctttttcctatcgtttttcatagcacctttgcctccgtcttcttcggaatccggataaagacacgcgttccttttccaggagtgctttctatcttcatctcacctttctctccgtaaagaacatggattctgtcacagacatttcgcacgccataaccggacgactgataggtcaggatctgatctgccttttcctgcgtcattcctgctccgttgtccctgatttcaaagaaaatatgctcattttcttcacgaatcgtcagccacaatgttggatcctcattatctgacacatcgattccgtgatcgattgcattttctgccagcggctgcaggatcagcttcggtatcatataatcattaagaccgtctgaaatctgttcgaccacacggaactcgttatcatgcataaccaactggatcttgaggtatgcacggatattatcaatttcttttgccactgtagtcattgtttcaccacgattcaggcttgttctataataagtagacagtgccaatgtcacataactgatttcatcctcccccgcttcaattgctttccagttgataatagaaagtgaattgtaaaggaaatgtggattgatctgtgcctgcagcgctctcatctcactattctgaagctggatcttactctcatatacttctgagatcaaatggttcatctgatccatcatgcgctggaatgaccgaatcaacacaccaacctcatccttggacttactctgcaccgtaaccttgcgaagtcccatattgatctggttcatattctctgtcaataattccaactgtgacaccatacggatggagaaaacataccctaaaagactcaaaaggagaacactgattaaaattaacggaatatttttaagcaaaagcttatggattgcattttcacttaccgccttcggacgatagatatagaaattccatccggtatctttcattgttctctgtgaaatataatacttatcactgatatccttaagattctcaatattctttggacgatattttttatccatagaacaatccgcataaacaacatttccattatcgtccataatcatgccacctgtattatctgtaatctgactcatgaatggactaagaactttttcataatccagacgcatctccaatactgctttgatcgtatcattatcgtagaattttcgactggcaatgattgatttatttcccccacgagtaatgctccactgcatcagcgttccttcattcagtctggaataccactgttgattctccgcttctgacattggaagaagtgtatctccatgtggcacttctatattgtcagaatacagcgtaatactccgaatctctttgtgatagatggtcggcatctgaagcaacggatctgctactttcacatatttcaaatatttctcataatctgattccatttccgtatcgaaaatattcctgagactttgtgaataggataaataatcgaccagattttcataaatctgtgactggttctcaattgagttcaccgactgctccagtattttttccaggttatactgttccttttctctcagctgattcgtcatgccatattgcatagaaaaagccaggaatacaaccggcaccaatcctgcaatcaacatcaaaactgacagtttcttacggaatttcagattttcaaatcgatggagcagcttccgtatttgttttttcatccgcctctgttcctttcctgcatgcttccggtgtgtctccgaaaaattcccggaagcttctgcagaagtatgagttattggaaaatcctacttcttttgcaattccggagatcttcatattcgttgtctcaagaagttctttcgctttttccatccgcacttcacggataaagcggttcagtgtcactcccgtttcttctttgaacacagcactcaaatatccgggagaaagaaataccattgctgaaagcgtctctgctccaagattcctctcctggtagtgatgataaatgtaactttttactttcgtaatctctgaacggaatccgtcttcctgttcctgtatacagtgttcatattcctgaagtgcttcgtctactatagcgatcacatccttcaggtttttgcaacgatataaccgatccactctcttcgaaagcattttctcatccatttcatccatctgatcaagcaattcttttaaaattccggaaaatacaaactttacatacatatctgaaaactgcttattggcacggtatttatcttccaatttctgaaaatcctgacggagatggggcagatctttatattgaatatcattcgtaatctgttccatgatttcagaatcttctgccgggtctgctttcttctcttcctgcttttctccatgaaaaaataaatgctgatgtggctggtagaactgctcttccagcattccttccagggctttaaactcctctgccagattctttctatcctcaatttctttactgaccgcaaaataacattcactgtcaaactgatacgcaaagaaccgatacattttctctacaaccacatgatagtctgtatacttctccgcgaacagaaagatggactcatttgaattcagatttacataataaaattctctctgcacctcttccttcagacttgtcagaaaatgttcctcctccgtctcgaaaaaaccattggatgcactgacaagaaccatgcgcgaaagctgtgaaacatcgtcttctgtttcatccgttaatttctcaagttgaacaaaatcctcttcttttcccgaatatagatatctcaggaagaagtatttcttcagataatcttcttttctgttctgctgcttttgcttctcttccttagatgagatattttccatcactcgttgaaaggtcttatgaaattcgtttggatcgaccggctttaggacataatccacgacaccatatcgcagagcctctctcgcgtaggaaaaatcattatatccgctgaaaatcacgatttccatctccggatgatcttctcttgctgcttttgtcagttccagtccgttcatgtaaggcatctttacatccgaaaataaaatatctacatgattcgaagccagtataccaagtgcatcctttccattcgccgcttctaaaatctggaagtctccttctcttttcagcagaaaacggattccccttctctccagtttttcatcatctacaatcagtattgtaatcattcccccgcgcctcccacacgctcattttacattttcactattccttttataacgtccgaaaacagcagggaatgatcactcactctctgctgtcttttttaagtttttataattctattttaattcatctctcagccattgtctatactagcctttgttactgttcacacgatgtgctaccagcaacgcatctcgccattttaaatcgcctttggcgatggggcgagatgcattcaagtcaaaacacgcatcctccgtgtcaatcagcggagtgattgacacgggagtgaacagtaactagcctttaactgctcctgctacaacgccttcgataatatatctctggcagaacaggtagaagatgatgatcggcacgattgcaagaaccaaagttcccatcattgctcccatatctacggaaccatatccacctttcagatactggactgccatcggcactgtcttatattttctctgatccaatacaagtgatggaagcagatagtcgttccagatccacattgcctgaagaattgtaacagttacacaagtcggctttgcaatcggaagtacaactttgaagaatgtctggattggtgtacatccatcgatcatcgcagcttcttcaatctccagtggaatggatttcatgaatccggtgaacataaagacggaaagtcctgcaccaaatccaagatagatcacaatcagtccccatggatttcccatatgaagcatatttgcaatcttagataatgtaaacatttccatctggaatggtacgatcattgcaaacagacaaagcatatataagacttttgtgaactttgtcttcacacgacagatataccatgcacacatggagcagcataagatgatcactgctacagataagattgtgataaacaaactccatccaaatgcctgaatcaatcctgtctgtttaataccacggatatagttctctaatccgacatacatctttccggtcggtatctcgaacggggctttactgatataggcttttttcttaaaggagttgataaataccagtacgatcggatacagatacagcagactgagtactgtaaaaataacggttaataatgtgccatgttttacttttttattcattactgctgcacctcctttgatgttgtcattttattctgaattaatgcgatcactcctacaataatgaagaagataactgcttttgcctgtcctacaccttcccaaccggttcttccatagaatgtattataaatattcagggcaagcatttctgacatcttgtccggtccaccgtttgtcaatgcaaggttctgatcgaaaagtttgaatccgtttgtaagtgtcaggaaagtacagattgtgatggatggcataaccatcggaattgtaacatatcttaaaagctgtactttatttgctccgtcgatctccgctgcctcgatcagctctccaggaatattctgaatacctgagatgtagatgatcatcatgtatccaatctgctgccagagcatcaggataactaatccccagaaaccatattttgaagaatatgtaagtgttttctggaaatgtgccagaataccgtttaataacagctgccatacatatccaagtacgataccaccgatcagatttggcataaagaatacggtacggaaaatattagttcccttaatcttctttgtcaaaagcattgctaccgcaaaagcgaaaatgttgatcagtaatactgttacgatcgtaaataatgcagtaaaccagagagagtgaaggaaatccccatctcccagtatctttgcatagttgccaagtccaataaatctggcatctgttaccgttgtaaacttgcagaacgaaaggtatacacctaacacgaatggtgcaaggaaacctatcgtgaatgcaatcagcgtcggcaatacaaataccggaaaatatctttttatagctttttgcatgttcttctcctcctgtctctctttctgtaaaaaggtctgtctctttttacacttctaataacacactttcagcctgcccccggtattctcgttggcaggctgcatactatttctctatttcacagcctttttatctgtcggtcctgtgaaaagccttttttattcatttgctgctgcgtattcttcagcccatccatcaacgaatgctgtctgtacactatcccatgtgcctgtgccctgtgcatagttcagaagagcaccaccaagattgttcttccagttctcagatggcattgttgtaaagttccagcttactggtgtctttccagcctctgtgtactcggcatttgcttttacaagcgggttgtccggaaggtaatctgcgaatgttgtaaacggtgttacgaatcccatctgatttgccagcatgtcacgaccttcgtcactctcaactacccatttcatgaaatcaagtgttgcctgaatatcttcttcagaagcgtttttatttacacaccagtagttctctgatcctgtacaaagtccctggttctcttctccatcaactccgatgtagattggaagcattcccatatcttcttctgctacttcgttatctttgatatcattgtaagcccatgtaccattctgatagaatactgcttcaccaagtgagaattcgcttgctgcgtcatctcctgtcttagaagagatcatagatggctcacatgtagagttgttcagatacagatcccagatctgtttgtagttgtcaaggtatgttcccttgatagcatctgtactatcaattccgtctgccttgtactcatagtaaattggcaggtttgcaaggtgagtcttgaatctccagtcagaagaagaatccattcctgctgaagtgaaagctccttctactccaagatcatctttatgtgcctgaatctcttctgctgctgtcttaagtgcctggaagttattcagctcatcgatggatttgatgcttgcatccggcagttcgaagtatttgttcagaagtgctttgttgtagatcagaccataagtctcaataacataagcgattccgtctactgcatcaccatcttttaatacatagtcatcagactcaacatctttgtaaacgtcactttttgaaaggtcatagcaataatccttccatgtagcaagtccaaccggtccgtttacctggaacaatgttggggcctcgtcttttgccatctctgatttcagctgtgactcgtatgttcctgatgcagctgtctgtacatcaaccttaacaccagtttcatctgtgtactctttagcaagttctacccactgatcagcctgctctggtttgaagttcagataataaacttttccggatgacttatctcctttcgctgtttcatctccgcctgatgtgcttccacatcctgcaagcattccgcctgccattgaagctgcaagtacaagtgcaagaatctttttcttcttcataatagaatcctccttttattactacttgtctttgtttttcttgatagtgttattatagtaaaaagtgccaaaataagatataataaaattccaagaaacataacactatttcaagattattgtaatttttgaagattttgtgtatgatacaagagttcataaagagtcaaatcggaaagggtgtgtctgtttttatgctatcagacacgacaggatagaaaaagatggatcgtacgatcaactatcagataacagaagaagcggacggcctgcgtatcgagcagttcctgcgtcaccagggctactcctaccagaacatcactcagttaaaaaagatgccggaaagcattttaaaaaacggagtctgggaatatatgcgttcactacttgctaccggagatattctcacagtacatattcaggaaaatgaaagttcaccgaatattcctcctgtcgaactgccgcttagcattatatatgaagacgaagatatccttgttgtcaacaaacctgccggaatgccgatccatccatcactgaataattatgagaattctctggcaaatggactaatgtggtattatacagagcaaggaaagccttttatcttccgctgcacgaaccgcctggaccgtgacacttcaggactgaccgtcattgccaagcacctgatcagttccagcatcctatcttccatgggcgcacgacacgagatcaagcgtgaatatctcgcgatcgtccgtggcagtgtaacacctccatccggcacgattgatgcaccactcgcccgcaccggcagttccatgattgagcgaaaagtagacttcaagcatggagagcgtgcagtcacacattataaagttgtaaaagaaaaaaacgggcacagccttgtctctcttatcttagagaccggccgtacccatcagatccgtgtccatatgcaatatttaggattcccacttgtcggtgattatctatataatccggatatggaatacatccaccgccaggcattacattcctggaagctctcctttattcatccaatcacaaaggagccgatggaattcacagcggaattaccgaaagatatgaagaatattcttatttaaagaacactatgcgcgaaaacactctctgccacaaatcagggagtgtttttctatctattcttatacactaagcttcttatctgccatccatccactaagtaaaaataccgctacacagattataatgtagtatacaagatatccgacaccaaagaataaatttcctgctacttctacattcggaagtacattgctgatcagattataaatcttttctattataaatgtaatcacaaagaaagctacgattgagattcctcctgcatattttgaatcccttaaaatagttcgagaaacgattaccgcaagataaccaaccatcacaacctctgtccatccgacaaagatgcagagaagattccagataatctgtgcgatcagctgcccttcgcctgacactcgtataaaactatctcttatgatcgcaaatacatttccaagttctccgacatactggatcgtccctacaaaacaaagcagtccggcaatcgcataaagtgcaaacacgaaaaacatctgtgcgattgctacaacaaattttgctccaagaatttcccatacggatttcggagtcatccagatcatatagctttgctttgttttcaaatctctgttcagaatcagaatactctcaattcccatatagaacactacaaaaaacgatccgactaataaaagcgttgcactgattcccatcaatgcatccttttcaaccagcatacctccaagaaatgcaagcacacagacagctaaagctaccataacaatcattctcgaagtccgctgtttcttccattcatatttcattaattttcccatcgatactccctccttacatcttctgcagataaagctctgcaagtgaatttcccgttgtcattctctctgtttcaacattcacgacatccacaagctgtccatcttttataaaaatcgcatcctcaataaagctttctacctcttcaatcagatgggtagagatcaccattgtacgattctcatctgcttcttccaggatcaaagcaatgatctcttctctcgctttatagtccacaccgttcaaaggctcatctaacaagagaagatctgcttttctcgccaatgttgcagccgctttcagtttcgcattcattccgcttgacattgcagacgctttcatctcttcattcaagcccaggcgttcaattgtttttctaaactgctctctgtcaaaatcctcaaagaaatctgcataatattcttctacatcttttaccttcatataactatagaaaaatggttccgttgacatatatgcgatggatgctttgtcctgatagctaagcggatgtccctcaaataaaatctctccctctgttggctgtgtcagtcccgctgccatcttcataagtgtcgtcttaccacttccattttctccgagaagaccataaatcgtgccctttttcaacttcaaagtaagctctttaactgcttctttattcccgaatttctttgtgatatttctgtactctaacatcatttctgctcctcctcgtaatcggcaatctgctcaataatctcgcctttctgaaatccaagatcacgcatctcgtgtacaaaattcttcaacagctcttctgccatctccttcttcacattgtcaaacatatactcctcctccgacacaaatgtaccgattccacgcttcgtgtaacaatatcctgccatctccatctcccggtagattctcgccgctgtgttctgattcactttatacaaaactgcaagctccctgttcgatggcatcttctcacccggtttcaactcgccctttaccatctttttcttaagctcgttgatcacctgaagatagattggacttcctgaattatattccatgtgattcctccatttatcttttttgcatttgctgtatcagtgctatagttagatagtacactaggtctttagttttgtcaatataaatatagacatttttctctttgattgatggttattctgacgacagccagtttgattgttttaattttgaattatacacataaaaaatagacgtccttgctttggccagcagacgtctatttttaatactttgctactatgatttactcaatctgccagtcaatcggctcgattccattcttctccagaaatgcatttgtctgactaaatggcttgcttccaaagaaacctctgtaagcagccagcgggcttggatgcggtgcttccagaataagatgctttggattcgtaagcattctcttcttcctctgtgcaggagctccccacagaataaagacaatcggtctgtcctggctgttcagtaccagaatcgctgcatctgtgaattcttcccatccgattcctctgtgagagttcgcctgatgtgctcgtactgtcagcacagtgttcaacattaacacaccctgctcggcccattttgtcagacacccatgatttgggattgtgcagccgagatcatcatggagttctttatagatattcacaagtgacggtggaatatctacacctttctgcacggaaaagcttaatccatgtgcctgaccgttattatgataaggatcctgtccaaggatcacaaccttcacatccttcagcggagtcagatgaaatgcattgaaaatatcttgtgccggtggaaagatcaattttgtcctgtattcctcatttaccgtctcaaataatttcctataataaggcttggaaaactctcctttcaatgcctcataccagtctccattcaaaccactcatagttcctgctctcctcttctttctgcttaaccattctctacagtctgacagaaattccttcgtttcttaaatactcttttacttctttgatttccagctctttataatggaataaagatgctgccaatgctgcatctgcaccaccgtctgtcaatgcctctttaaaatgctccaacgttccggctccaccggacgcgattacaggaatcgatacactgtcagcaatcgcacgtgtcagttccagatcatatccagccttcgttccgtcaccgtccatacttgtcagaagaatctcacctgcaccaagggactctactttcttcgcccactcaactgcatcgataccgacatccagacgtccaccgttcttataaatattccatcctgttccgtctgctcttttctttgcatcaatcgccactactacacactggcttccaaacttctctgccgcttcacggatcagctccggtctgttgattgcagaagaattgattgaaatcttatccgcaccttctcttaacaatgcacggaaatcatcaactgtccggattcctccgccgacagtaaacggaataaacacacattccgcaacctttcgtaccatatcaacaactgttcctctatcatctgaagaagctgtgatatccagaaatacaagttcatcagctcctgccttatcatatgcctttgcaatctccaccgggtctccggcatcctgaagatcaacaaagttcacaccttttacaacacgtccggcattcacatccagacatgggataattctttttgtaaacattctcgcactcctcctacagctctacaaagtttttcagaatcttcagtcctacatcactgctcttctccggatggaactggcatgcgaaaatattgtccttctcaacagacgcatggatatgtgttgtatactctgttgatgccttgacaatctgttcctcttctgctttcagataataagaatgtacaaaatatacataagaattctcagcgattcccttaaaaagtcttccatcattctctaaatgaagggaattccatcccatatggggaatcttatatccttctttatcaggtatccttaagatctcaccctttagaattccaagtccttctacacccggagcctcatcgctgtgctcaaataaaagctgcaatccaaggcaaattccaagaaatggtgttcccttttctgtaacctcgcggattacttcatcaagccctgactgttttaatttctccatagcatctccaaatgcaccgacacccggaagaatcactttatctgcatgaaggatctcatctctgtccgctgtaactataacatcctgtccaagtgcaagcaatgctttctcaacactgcggatattaccggcatcataatcaattattgctatcattagcctacctcttatctgtaatctagtatctattttctatactttaccacactttgcgtcgagttcaaaccaaaattcgactccattgtcataatttttcacgccgtacccctgatggaaagattccatgattgccttaacgattgaaagtccaatcccatttccaccatattcacgtgtatgtgctttatccactttataaaatttatcccacagttttggtacatcctcttctggaatcggttttccactattaaagacggaaacacatacttttccatccattgaaacgatcttcacttcgatccgcttctcatttccgacatgatgaatcgcattcgtaagataattccgtacaacctgttctgtcttaaactcatctgcccagacataagctgtctcatcagcaataaaatctacattcgcattaacctgttggatcagaatatcacaacttgcaataacacctttcacaagcttcacaatatcaaaccgttcaaattccacttcatctgtaccgaattccaactgattcagtgtcagcagattcttgaccatccggttcatctttcctgcttcatcaataatgacatcacagtaaaactctgtactttccgggtcgtcattgattccttcttttaacccttcggcatatccctggatcaatgcgatcggcgtcttcagctcatgggaaacatttccaagaaattcatttctcatattttcaagtttctctttctgctcaatgtcctgctgcagctgattattcgcagtcttcaattcagatattgtcttttccagctgatctgacattttattaaaattctcgcccagaacaccaatctcattctttccgccgctcgtatacttcgcatcaaaattcagatttgccatatcttcggaaagtcttgccagttccaacactggttttgtaatccttcgtgaaaaaatccatacaaggattcctccaaagaacattccgaaaattccaagataaatcagaaactgattggcaagattggcactttcacgaatactgtccaatgggcttcgcattgtgacaaacacactatcacttaaatacccccacatttccagataatccgtaccgctctgtggatcctggattttacgaaccacataatcatccgaatgcttgagaatcttttcctgatcatcatctttcaggaagaaaatacggagcatctgtttgtacaggaaaccttcttcctttacatttgtaaatacaacctttccatcgtcagaaatatccatcgcgcagacatcaatattcgttttttcaagttccgccacaagtttcttctgcactgcctcatttccaagatttccattgttcactgcttcactcatttcctcatacatctcaatcagatctttctgcttatgagacatataatatcgtccaagaaaccctgtattaacaatgaaaactaacatcagaacaaacactagaagtccaacaaaaatagctgtcatctgtccgctcaacgtatatttcagttctctttttgctttcttcatctgatttatttctccgtgctctgaacttcaaacttatatcccatgccccagattgttttgatatattcgcccttatcgcctaatttacttctcagtttcttcacatgtgtatcaattgttcttgcatcaccaaaataatcataattccatacattattcaatattttctctctggaaagcgcaattccctgattttctataaaataggtcaacaattcaaattctttataactaagttcaaccggtgttccatcaatcttcacgatatgtgctgacttgtcaatggtaataccgcctgcctccagcgaatcattgccgaccgctcccaaagttctgcgaaggatcgcatttactcttgccacaagaatctttggactgaatggcttggaaatgtattcgtccacaccaagttcaaatccctgcagctcatctctctcctcagaacgcgctgtcagcataatgattggcactttagaagtctctcgaacctcacggcacacctgccagccatccattttcggcatcattacatctaaaataatcagggcaatgtctttatcttcgtaaaaaagatccattgcttccattccatctccggcttctaatactatatacccttctcttgtaaggaaatccttcacaagttttctcattctgctctcgtcatccacaactaatattttcgctctttccattttcttttctcctaacttatatttgggtgtaccagattacttctacatttaattaccttttaatataccaaatagttttgtcaatattgtgaacaacaaaacggtcagtctataaatgtgtgtcaaaacttcatttacagactgaccgtctcttcttttattcaagaatgcctctgcaggattattcaaactcatagttagaaaaacattcatttgcctcttcttcatcctgtccattcacaactacacgcattggcagtcccagcttaatagacattaaccccataagggatttaccatcgatgatataatttctgtttgccatatcagttacatcaacgtctgattttaatttctgacaagtgttgcaaaatgtcatgatctgccctgctgacataaacttcactttcttttctaccatgttttttacctccatctgtctatcgagtacaagtaataataaaagccaacacagaaatctgcacaatgcctgaatgcagattactgtaatttcaaacatacttgaccagtatataccacttattccggaggcgcaagtgaattttcgatttttttcgacatattgtctaccttttttgatataaagttctcacccggagaatcttgacagccactactgtcacttttataataattgatggcttattattactgctttccgccagaaagcagcaattcaatcatgacagtaggtactacacacgaaaatgaggtgatatctatgaaacacaaatttcaaatttctgaatctatccggcttggagcaatccttgcactttccggtggattcatggatgcttactcttatatggagcgtggagaagtatttgccaatgcacagactggaaacatgcttctctttggggtacatctctctcagggagacttccagaacacaatgaaataccttttccctgtactcgcctttgcacttggaatcgctcttgctgaagttgtccgggctaaggcaggaaatctgcttcactggagacagatttctgttctggcagaagcactgatcctgatcgcagtcagtttcttcccaacagcattgaatcttccggccaatgcattaacttcttttgcctgtggaattcaggttgaaagttttcgcaagattcatggcaaaggaatcgcaactacaatgtgcatcggtaatctgcgcagtggaacagagaacctgcaccactatttccatacaaaagaacgacattttctggatacaagtcttctgtattacggaatcattgcctgctttattgtcggcgcagtgatcggtaatgcagcagttcagctgttccagacaagggcaattcttggctgttccttcttgctattaatttcattctttatgatgtttattgattgggaaaagaaagaaaaggagcttgcactttaatgtgcggcttcttttttcataccggttttcagatagaaaaaatcccgaaagtgcaatgttgatcagcacttccgggaaaaatttactgcggatgacaggacttgaacctgcacgtcgtaaacaccagaacctaaatctggcgcgtctgccaattccgccacatccgcatatttcttattcaattattgattaagaaaaaaatagaacaagcgatttgcttgttccagtgagcgtgcggggattcgaaccccggacaacttgattaaaagtcaagtgctctaccacctgagctacacgcccttattcatttttatttctttcctgctagcaggataactgggctagctggattcgaaccagcgaatgcaggagtcaaagtcctgtgccttaccgcttggcgatagcccatcgaagacttcatatctgacactgcacggccagttggaatatttaaagaaaaaggtggatagccggactcgaaccggcgatatccagaaccacaatctggcgcgctaaccaactgcaccatacccaccataaaacgagcctggggggattcgaaccctcgacctacggcttagaaggccgttgctctatccagctgagctacagactcatttctcttaatgagaacctctcgttttcaaacgagaagcgggtgatgggaatcgaacccacgtatccagcttggaaggctggtgttctaccattgaactacacccgcaggatgatcggggtgacaggattcgaacctgcgacctcctggtcccaaaccaggcgctctagccaagctgagccacaccccgatatcagttttatttccttgcccctgcggctttgtgtttctttcgtatctcccgcagcgacaagatatattatatggcatgtttctcagaaagtcaacaggttttttaaagtttttttacttttttacgactgtttttttacctgtttttcacaagaagagtgtgcaaattgtttcttttgttttagttttctgataattaaaacaattatagatatttttgctcaaaactcaattttccgtccccattgacttccatgatcatatagctgcctcgtcttccctcctgacgtggaaaagatagacttcccgggtttaaaattgtcattccatccttctgaagaaagaaaggacgatgtgtatgaccaaacattacgagatccgcacctcttgatctgccctcttctatgatagtttccatccccatggacacataataataatgtccatgggtaataaatgcatgataaggaccaatctcaaactcctcttctctcggaagttctgtaaaaaagtcgttatttcctcttataatatgcttctcacactctacgacagcctccagatagtcttctccaccttctacatctccaagatggataaacatatcaattttcccagcctcttctaatgcgcggtccagtgcctggtgtcttccgtgtgtatcactgacaatcagaattttcatgcttcttcctcgttcaatttctcttccagcaggatttttattgctcgaagtgcttttcctctgtggctcaatttatttttctgctccggtgtcatctccgctgttgtacatccgaattccggaacatagaaaatcggatcataaccgaatccattcgcaccgacaatctcgtgtccaatttgtccttcaatcgtctcacggactacgcttgttgttccatccggaaatactgctgcaaccgcacagacaaatcttgcggtacgctcatcgtccggaaccccttccagtctgtccagaaggattctgttctttatatcataagaagtatcctctccggcaaatctcgcagaataaattccaggtgccttatccagatagtcaatctcaagacctgaatcatctgcaagaacaatatcgttgaccaacactcgtgatacagctcttgccttgatctctgcattttcttcaaagctcattccgtcttctacgatttcttcatcgactcctgcctcacgcatcgatacgatctccataccaagatcagcaagaatcatccggatctctttcatcttattttcatttcctgttgcaaatacaattcttctcttcattttgctttctaccttctattctttttcaccaacaatctggtacagcgtttcttatttcttcggtctcggtggctttggtccctggaactgatagaaatatgttttcagcataccattataaatcttacggtttttatctgcttttcttccgaaataacgttctgcgtcttcataacttgtgatcatgtatgcagaccaactgtcaagtttcctaaagctctcgccaaattcacgatataaaccaggaagtgcctctttctcctcaagacgctctccatacggcgggtttgttataataaatccatatttcttcggatgactcagtgcactgaccggtctctcctggaaatggatcagatgatccacacctgcattctctgcattctgtcttgccatccgcacaacatccccatcaatatcatatccctggatatccgtctcaatctgatcatcgatcagatcattcgcctcatcaatggcctcataccagagtttcttatcaatcagattcgcccagctctcagccgtaaaagaacgattcattcccggtgcaatatttgctgccatcattgctgcctcaattggaaatgttccacttccgcaaaacggatccactaagatacgctcttttctccacggtgtcagcatgatcagtgctgctgccagtgtctcagaaatcggtgctttgccggctgacggacggtatcctctcttatgaagagaatctcccgatgtatcgattccgatcgtaacgatatccttcatcaaaaatactctcagtggataagaagctccatcttcctgaaaccactgtacatgatatctgcttctaagacgatctaccatcgctttcttcataattgactgaatgtccgaagggctgaacagcttactctttaccgatgaagctttcgccacccagaacttcccgttcttcggtatataattctcccacggaattgcttttgtcttctcaaacaattcatcaaaggtaactgctttaaaacttcctgccttgagcagaacacgttctgctgtacggagaaatacattcgctctgcacgctgcatctgctcctccgtaaaaggtaactcttccatcttccacctgtgcgatctcatatcccagatcctgaatctccctttttaatactgattcaagaccgaaatgacacggcgcaatccattccattctttccatatctacctcatattatctttatgtacttattaattactgttaactgattcttattttacagtattataatttgatgtaagtgtcaaaagtataaattgcgtttgtgctcgcacaaataagcaattcatacttttgacacttacatcataattctactataaatgaaaggcagagtaaagtgcgattgcctttcttctctgccttgttactgtttataagaatcttattcgttactgctcacagtatctgttaatatctgtctgactcatcataatcatcttttccgccatagcagtcatctgcattttgggaattgcagtttgtgctgttcttattcttatttgaataagaatttttgctggaattcttattcgaacctgaattagatgttgaatttctgttcttactctgattttcttccttcgatgaatagaatccattctgagaatttttacttgtgttgctataattttttgccatgatgcttcctccttatttggtgttactgttcttattaactgacagtaactatttagtacaatctttattatcccaaacggaggtctttttatgcattttgtttcaaccatattttgaatattttgcttgctttttccaaatgcatatattatactgattcatgtagaaagattattttctacaaccccttattaattatttatactcccctcaaaagaccgatggctcccccatcggtcttttacttttcttttttctaatatcgtcggttcccaccgatcagtctgatcacgatcataatgatcagaagaggaacaagaaccggtgccagaaaactgataattcctgttataacagacacaactactacgactacaaatacaaccgcaaggatcagcaaagccttcttccaccaggtatctaatctgaactcatgataggaaccataagaatgctctgttccatattcatccttctgtccataaccagtatagctgttctgtgcctgcgttgtctggttgtacgaattattgaatggactcctgttctcataaaccacttcttcgtctgttccatcacttgaatctacaatggttttcgcaattgcccacggatctccgagcagttccaagacctcctgctcgctctttccttttctcatttcttctataatataatcatcataaaacttaagatgatcctgaattattgcggcatcaagctttccattcaaagcctcctgtaattttcggataaattcctgtcttgtcatattcaactgttacctcctgttccgaaggttactgttcacacgatgtgcgaccagcaacgcatctcgccattttaaatcgcctttggcgatggggcgagatgcattcaagtcaaaacacgcatcctccgtgtcaatcagcggagtgattgacacgggagtgaacagtaacttccgaagttctctttagatgtagaataccacactgccattcttttttaaaccgttattttccactacatctgtcgttcataatttgttcatttatcatttaaaaatctttcatcttcttatcactttttcttcatttctctcacatatactataagcatcaaaggaaaaaacaaaaaactttgaataaactttttcataatacatgccgggaaccagtaaatggttacccggcatcctcccttttatggagacttttttcttattccggaacaaccggatcatttatcacttcttgtttcgtttcctgttgtatttcctcttctacagatttttctgcagtttcctctgtttgctgttctgtcgtttgctctgtttcttccttgttttccccgttattctcttctttcgtcgtttcttctatcttcttttcacatgctttgaccgattccagaatctcctgaacccgttcctccatctctttcttccatttcatatcttccaatgctttttttctttcctgttcagtttcactatgttcttctggtattgtttttacatcgtctgctttctgagcttgcactgccgtttcacttttcccaactgtattgttgctttctcttccccggctcatcccaattcctgctgccgcaattactgccccggcagcaaataaaagaaccaccagtttgacattccgaagttttactttctgttccagattccattcctcgcgttcctccggaagatcacgtatcacctggctgatcttatcataatgccgtcttccgccaccggtacaacgttcaatgatccgctccaatctgcgttcttcacttctgctaagttccgggatctgctctgtatatgccagtaaaaactgcaaaattttaccatatccaaacaaatctacggaacaatttttcttgctgcctgacgctgtcgggcggataaaatgactcctcaccgctttctgctgcatcttcttcataacaaattcattttcctgtgcatccggatttaaaagcagcaattctccttcttctgtcacaacaatactatatggggtcagacaacgataattctgcccacgtctcgactgctgatactttcttatttctccggcaatttgtcggaaccattcaaataacaccgctttatccaactgtgtattatcccgcagataataaatcaaaagttctccctgcaggcaatcgatacttggctggcattcggttcctttttccacgaagcgaagtacttcatacattttttccatatttaattctactgcgatctgtcatctaaacgtgtgcggccccacaccgcacacgatacaatacctgtccaattgaaaattatcagaatctgatacgaactactcttcagaatctttcctgattcttcagtcagaacgactgaagtgtgactctcatattaattgaattcttccagtctgtcaagagctgcggcaacaactttatccatgtcataatatttataatcacccagtcgtccgccaaagattacattttcttccttttctgcaagcttcttgtattcttcaaacaatgcattattcttctcatcatttaccggatagtatggttccatgccaacactccattctgatgaatactctctggaaataacagtcttctcctgcttgccaaactcaaaatgcttatgctcgataattcttgtatacggaacttcacgctctgtgtaattgacaacagcatttccctgatagttctcacaatcaagaacttctgtctcaaatctgacagaacgatactccaatgctcccagctgatatccaaaatattcatcgatcattcctgtaaaaataatcttctctgcaatctccggattctcttttctgaattcaaagaaatcaatccctgtgcgaacttctgtcccttccagcatcttctcaacgattgctgtataaccgccaaccggaattccctgatatctgtcattgaaatagttattatcgtaaacaaagcggaatggcagacgtttgataataaatgccggaagttctgtacactttcttccccactgtttctctgtataacccttgatcagtttctcatagatatctcttccgccaagaaaaagtgcctgttcctccagattttgtggatctgtgattcctgtctctttgcgctgtttttcaataatctcttttgcttcctgtggtgtgcggatattccacatcttactaaatgtattcatattaaatggcaggttataaagttcatctttataaactgctaccggtgaattgatgtaattattaaattccgcgaactgattcatgtaatcccatatctttttatcagacgtatggaaaatatgtgcaccatatttatgtacatggattccttctatgtcctcacagtaaatatttcctgcaatatgatctcttcggtcaatcacaagacatttcttcccttttttctttaattcatgtgccatgacagctccataaagacctgctccgacaatcagataatcgtattctttcatatttactccttctttccgcagaacgattgtctggatccggtaaaattcagagatcaacctttctgccttctttcttttcatattatgatagttactgttcactcccgtgtcaatcactccgctgattgacacggaggatgcatgttttggcttgaatgcatctcgccccatcgccaaaggcgattcaaaatggcgagatgcgttactggtcgcacatagtgtgagcagtaacttacggtgtgtttatgataacacattttctaataaatttgaatctctatcaaaaatacggtatacttaacagcaaaaggaggatgaattatgcttataaaaaatggttttctaattgatcctgcatctgatacagaacgtcttgtcgaccttcgcatcacagacggtcggatccagatactcgcagatgccggaactctgacacctaaaaatggagaggatgagcttgatgctacaggacttatgatttctccaggacttgttgacacacacattcatttccgtgatcccggatttacttataaagaagatctccataccggatctcttgcagctgctgccggtggatttacttccgtgatctgtatggcaaatacttcaccggtcatcgattctgttccggttctcaaagaactgatggaacgggaggctttggaagacatccatattttccaggctgctgctgtctcctgcggactcaagggtgaagagatgacttctatgaaggaacttgccgctgccggtgcctgtggattcacagatgacggaatccctcttaagaatgctgcctttctctataaggccatggaagaggcgaaggctcttgaccttccgatcagtcttcatgaagaagatcctgcatttattgaaacaaacggaatcaaccacggacctgtatctgatgcgctgggcatctacggatctccttcgattgctgaagaatctcttgttgccagagattgtctgctggcgcttcgttccggtgcacaggtcgtgatccagcatatcagctccggacagtccgttgaactggtacgtacctttaaagctatgggagcaaatctgcatgcagaggcaactccgcatcatttcactttgacagatgaagctgtattaaaatacggcgcacttgccaagatgaacccaccgcttcgtacagaaaatgatcgccttgctatcatcgaaggtctcaaagacggtacgatcgatctgattgctacagaccacgcgccacacagtacggaagagaaatcccgtcctatcacacaaacaccaagcggtattattggtcttgagacttcccttgctctcggaatcacttcccttgtacgtccaggacacctgacattaagccagctgatcaagaagatgacgatcaatcctgccagcctgtatcaccttccgtgcggttctgtcgcagagggaaaatcagctgatcttgtactgtttgatccgaatgagaaatggactcctgagacttatgcttctaagtcttctaattctccatttaccggatgggaattgtatggaaaagtaaaatatacaatctgtgatggaaagattgtatacaaggattaatctaagaggtcccctgcagaatctttcatttccgcaggggacctcttctttgctcattaatcctcgatcgctgttactgtataatctttgtcttcgactgtctttttcagcacttcattactgatttcggaattcagtgtcacaactgctgttccggcctcatggctgacttctgctgtatcaacctgctcaagtgcctcgagagctttcttcacagccgcttcacagtgtccacacatcattccttcgattttcattgtctttgtcatctttgtttcctccttgttttctgactcatttttgtctgctaagacaatatctgaaacagtattttctgctgtttctacctttttcatctttctttttctgtctttgctggcatcgtacattttaaacagattcagtctcaatgcatttgttactacacagaaactggacaggctcattgccgctgctccgaacatcggatttaatttccaaccaaagatcgggatccagattcctgctgccagtggaattcctatcgcattatagaaaaatgcccagaacagattctcatgaatgttgcgtaatgttgcacggctcatacggattgccgccggcacgtcacttaaccggctcttcatcagcacaacatccgctgcatcgattgcaatatctgttcccgctccaatggcaattcccatatctgccctggtcagtgccggtgcgtcattgataccgtcacctaccatcgcaacctttcctttttctttcagcttgcggatcacctgttcttttccttccggaagaacacctgcgatcacttcatccacacctgcctgctcaccaattgccctcgctgtgcgctcattatctccggtcagcataacaacatggattcccatattctgaagttctttcactgcctgtggactatcatccttgatcacatccgcaactgcgatcatgccaaggaactgctcattccttccaaagaacagcggtgtctttccctgctgtgccaaccgttctgcctgttcttttatgctggcagaaatcttcattttgtcagaaatgaatttaaaattgcctccgtacagccagtcctctccaagttttcctgacagaccatttcccggaactgcctgaaactgtgtgatttcacttttctgctctgcttccccattttcttctgcctttgcaagaattgcccgggcaagcggatgctcacttttcttctccaatgcatttgcaaaaaataataattcatgttctgtcattccgtccgcagggagcagatccgtcaccttcggttctccacttgtgattgttcctgtcttatccagtgcgacaatctccgtctttcctgtctcttccagcgaaacagctgtcttaaacatgattccattcttcgcgcccattccatttccaaccataattgcaaccggagtggccagacctaatgcacacgggcagctgatcaccagaacagaaattccccttgcaagtgcaaatccaacaggctctccgacaagcagccatacgatcattgtgacaactgcaatagaaataactgccggaacaaatactcctgaaactttatctgccactttggcaattggcgcttttgttgctgccgcatcacttaccatctgaatgatctgtgataatgtcgtatcctcgccaactctcgtcgcctcgcaacgcagaaaacctgactgattcattgtagccgcagacactttatccccttctgctttatctaccggtatactctctccggtcagggcagcttcatctactgcactgtttccttccagaacaattccatccaccggaatattctccccaggtcttacaacaaactgatctcctcttctcacctggtcaatcgaaacttcctgttcttttccatcacgcaggagcgttgctgtctttggtgccagcttcataaggctttttaatgcatctgttgtctttccctttgaatgcgcttcaagcatctttccgactgtgatcaacgttaaaatcattgctgctgattcaaaataaaattcatgcatcagctccatcacatgatccatatcgcctgccgtctgcgctgctgtcatagcgaataatgcatacacgctatatccataagatgcacctgcaccaagtgcaaccagcgtatccatatttggtgctctatggatcatgcctttccatccactgataaaaaacttctgattgatcaccataacgattgtcgttaacaggagctgcgccagccccatcgccacatgattcccttccagaaataccggaagtggccagccccacatcatatgccccattgacagatacatgagcggaatcaaaaaacacaaagaagcgatcagacgccttttcatcttcggtgtctccctatctttcaacgcatcttccgcacagttctgctcactttgattcatcccatacctttcattctttgcagatttcaacgttgccccatatccagcttcctcaacagccgcaatgaccgcatctactgttgctgtgccttccactcccatggaattcgtcagaagactgactgaacagttctcaactccggggacttttccaaccgctttctcaacacgggcactgcaggctgcacaactcattcccgtcacattatattgttccatcttactcctccttcaagttgtgatccggactttttgtgccagatctctcttcagatcttttatcgcatcaatttctgaagtgttgtcacgagctcgtcaatcgtttcatcttttccatcccggatatcatctgccacacatgtccggatatggtttgccaaaagcactttattgaaactattcagagccgcattcaccgcagatacctgaatcagaatatccggacaatacgcgccttcttcaaccatccttcgaactcccctgacttgtccttcaattctactcagacgattcatcagatctttatattctttttccggtcgatcctttgtcttgtgacaacatcccggacagactttcttttcttccattgtatttctcctgtcgtataacccccagggggtatattttctaattattaatatataccccctacaggtatatttcaagtgatttttaacaaaaagttactgttcatgctacgtacggttgctgcttacgctatatgcggccggcaacaacaaagaagctgtcatggaacatttcacaattgtatctatgttccatgcagcttctctgcaatccattattatgttcgttattatatttcctgacaaatctgtcttattctacactcttgagtgattcaaccatgttaatcttctttaacttaaaatacatcactccattgacaaacaatgaaaaagccactgtcagaagaaaggcatacaggaaacttggtggatcgatatttcgtccaaacataaccgaatcaatctccactgtctcaacaataaagcggtgcagaatttttccgatcaacaatcccgccagtgccccaatcaaggtcagcaggatattctctctgtaaacataagaagaaacttccttgtcataaaatccaagtacctttaatgttgccagttctctcttgcgctctgtaatgttaatattattcagattatacagcactacaaacgccagcattcctgctgaaataatcaatacaataatcacgatgtccagactctccagcatatgatccacctgctttttcaggcttgtcgtatagctgatgctaagtgttccatcacacttcattatattttcgccgacatcctttgcctcctctgttgtacggtcctgagttctataataaattgaattatagaccgaagcctcaccgaatgtcttttcatagacttcagatgtcatatagagataatgtcccatatagttctcacagattgcactgatcaagaccgttttctctccatcatctgtatcaatcgttaatttatcaccgacattgatttccagcagtttcgctactttttcagtcaggattgctcctttatcatccaatgaataaatttcttttgttttccgatcccggatcacgacaaactttttgaatgcttccacatcttttggtacatctaaataaacttcctgagaagactctcctgaactaatctcaatatttttcaaaagattttctgcagtcactgataccttcttatccgtatccagttctttctgaacctcatttctctcttcttctgtcacatcttcctttaaaataacgtctccatcataaagctgaatctgttcgtattgaagcggaacgattgctgaaatagaatcttttaatccaaaaccaaacaacatcatgcccatacaaccgccaattccaaatactgtcatgaagaagcgttttttataccgcaccaaattacgcacggtcgatttccatgtaaaattcagatttttccagataaacggaactcgttccagaaatactcgttttccctgttttggtgtcggcgggcgcatcaattctgctgcctgctctcgtaattctttcatacaggagaacaatgttgcgattactgtacatgcaagtgccgctgcacatgctgttacagcataatacaaattatacgggatcacaacatcatgcatatgacgatacaggatcttatatgcagtgataatgatatatggaattatcttttctccaatcagaattccgaaaacaccaccagttaatgtcgcaaggatcgcataccagagatattttccaacaattgaagcatttccatatccgagagccttcaaagtaccgatctgcgttctctcctcctctaccattcgtgtcattgttgtcagactgatcaatgctgcaacaaggaagaaaatgagtgggaacactttaccgattgcccgcatacggtctgcattatctccgtatccactgtattctgtcagattgttccgatcataaacataccactttggcttttcaagatcatcaatcttctgctgtgctttcgcaagctcttctcttgcttctgtaatctgccgctctccatcttcaatcttcttctgagcttctatacgaccttcctcatacactgcccaaccgtcttccagctcctttgttccgctgcttaactgctgctgtgcctcctcaatcttcttctgtccctcactgatctgctgccatccgctgtcaatctgctgctgaccggatgtaatctgcgcctttgcctgatctatctgccgacttgcggtaaggattgcagcatctccctgtgtcaacacatccgtcagtttctgtatattatcctgcaataccggaataccttcttcaatctgagctatcccggcttcaactgctggaagcccttcgttaatctgcgtcaatccggcttcgatctttgtctggtttttctgaatctccgcttcggcagctttcgcctccagttccattttatccagatttgctttcaattcagtcaacttctcttccattgctgttttttcagcttccaactgttctaactgagcctttaattccggctcttcttctcctgcttcctgcttccggtcgtattcttctttcagtgcctcatagttctgtaaaagaagttcatactgtgtatttagttcttcataagactgtttcaacggctgataaatctgctgatacgcagactgatagtcttctgcctgttgctgcaattcttcctttgctttcagaagctcgtctttcttttgctgcatctgtgtctgttgcgctaaaagttcttgtctctgatcttccagactttcttcctgctcttttagttgtgccagctgatttcttaatgttgtaagtgcaatctgtttttcgctaagttcctgtgcaccctgctcaacttgtgctttggactgatccagctccttttgctttgatatcagaagatttctcgactgctccagttcaagcttcgaagctgccagctgatttcttcctcgttcaagttctttctgcgctgcatcaagtttctctcttgcacttgcaagttcttcttccgcctctttttttccatccgccagatcctgttctgcctgagctaactcatcttgtgcttcatccactttttcctgcgctgtcgaagtaatctcatcatatctggcctgttctctttccgctttaattgcctgaacctttttcagcacagaatccacatgttcttcatattctttcgtaaatgcagtcgcttcctttgcaccttcaacctgcactgtaatctctgtatacacatctaatgaaaatgctttctccggaacgcaaagaaaggcactgacacttccatttccaattgttgtactgcctctgtgaaatgcaatatactccggactgctgaccgtaccaacaatggtaaatgtatctgtcttaagtgtatcttccaaagaatccgaagtcccactcgataatgtgatcttatccccaatcttcagattctttccatccagataatctgcatctattacacattcattttccttttccggaagcctgccatcttctaactgaacttgattcatcttatcctggagcgccataacatgaactgctacctggtttccccgaatcgtacaaagtacatctgttgcatagcttccttctgcatccaatacaccatccacagcacgaattgcatccagatcatcttctgtcagtcccattgtactcattacctgaatatccatcaggttcttctcatcgaaatatgcatctcctgaatatctcatatccggctctgatgcacggattccggaaaagaatgcacatcctatcgcaacaataaagaaaatggataaaaaacgtccaaggctatgacggatctccatataaaagttttttcgtaatgctttcttcatccacatcccctaccattcaatttcatcaatcgaagtcggattctcattagattctattcttgctacctgtccattttttatatgaatcaatcgatctgccatcggcgcaagtgcctgattatgtgtaatgataataactgtcattctcttttctctacacatattctgaagtaatttcaaaattgattttcctgtattgtaatccaatgcacctgttggctcatcacaaagcaaaagctttgggttcttcgctaatgctctcgcgattgaaactcgctgctgctcaccgccggaaagctgtgccggaaaattattcttccgttcccccagaccaacttcctccaaaactgcctgtgcatccaacggatccttactgatctgcaacgcaagctcaacattttccaatgcggtcagattcggcacaagattataaaactgaaaaacaaatccgatatcatctctgcggtatcctgtcagctgtttggaattataagctgtaatatcttttccatctacatacagcttcccgcttgttgccgtatccattccgccgagaatattaagcacagttgtcttacctgcaccacttggtccaacgattacaacaagttctccctgctcaatcgaaaagctgatgtgatccactgcatgaatctcaacttcacccattttataagttttcgtgatatcctgcactttaacgaattccttcatctacattctcctgactctttttctcttcttctgcatctctcctggcaagcagtctgttgctcttttcttcgattctctacagacgcagtttctcccactcttctcctgcaccgaatgtctcatgaaaacgttccggaagcggtgtatcctggaataatttcttctgatactgtacgatcagactcgcagctaacggcactgcacctgaatattgccgtttcaaaaccttacaatatttctgacataacggatctggctttacactcatcactatatcatgcaatgaatcgtatttccccactgccttcatcccaagaaacaacgcttttcgctttccagatgtcggtgccagaaacagcttatgataaaaaaccatcccttttaatgccttatagatctgctcggctgttacatctttgaaaaatggtgcgatcacttccgcatactccatcttcggctgaatgtgctttgctgtcagatagcgcaaaggatcatgataatcttccgtcagcatcattcgatccagttccatctcaatctcattgtgtgaaactcttccgacctgcataattttttcaacataaggatggcattcactgtctaaagcaaaatgacagataaatccataaatatatgcacgcgccgctgccggatcttttgctttctcaatcacttcaacagcatgatggaaaaactcatcggcaaattgttcatgaagtgtatgcccctgttcattcaccggatctttctttaatgcattataataaaataaaatatccggtccatgtaacccaatatcaaacaactctctatgcgcttctatagaattctgaaggggtcttggaagtgcgctgagcacctcttttccgaatttataatgtgcgtatgttgttggcataagaaacctctcctttttccgaattttcttgttaagatttataattactcatattattatattaacacattcttccctgtctgacagtaattatctttataaaaaatatgtgaaatgacattaaaaatgctaaatttttactgctttttcacttcttttaacgcaataatcacttgacatttatatttctttttactatattagtatgtacagcacacaagagaatgtgtctgttacagtagagagtatttattactctaccctgatcagggcttgtactggtttcgacagggatctcgaagatggagaagctatccgtaggctgatgcgttaaatcgcaaacttaaaattaaacgctaacgataatttcgaattagctgcagcctaaatgctgcatgtcagccctgaagcactcacactttaggaatctggcaccgactatgtgagaaacgatgacggcaaagctttgagctgtcaggcgtattatgaagctactgaacccgtaaggatgttagttttcgtacggcagagggaatgtcaaataactgactatgatagtagaagtacatgggacaggtttttggacgcgggttcgattcccgccaggtccactttttaatgaaaagtgtgaagactttaaaataacggcattgtatctcgtaagatgagattcaatgccgttattttttgaataatatctttgcctccaaatggaatgcataaaacaaaaaactctgagattcttgcaaatattaacttcacaaaaatctcagagaaaaaataatgccgcagaccggaatcgaaccgttttaagcaatcacaaatactgatagaaaggggctttgaggacttcatcacggttgcggtgttcaaaaagtgttcaaacgtttgtcgcatacaaactaaaaagttgttactttctgcatagtgtatttcctaaaatgataattactacgacatcaaccaaaataatccccaatgcaatatatacaaaaaatgcaggcaaaatattttcaagcaagcccattgtcaatgcaagaattgctataatagacattccaattcctattgttctgcataacttcttttcatcatatttttccttttcttcttttgaagccgtattatatccggaaataaaccaactcccgtgtccagaaagtaaaataatagaaaatacagcaaatatcacaaagacaatccacactatccaatcaggacctgttgctaaatctactaatttcatttataagcacctccttaaataccgatttgtctgtttcatgttatacacagtataattccattttataaaatattcaattaaaaaggtatgcgaatattttttatttccgcatacccatttatcactttattcttttacatatcgaattaactcaccaatttcacattcaaaatagttgcatagtttacagattaaatttgcgtccagtctttgaaattcatttctgcaatatctattgaaatttgaccttgggatatcgagttccttacaaatcatattcttactgatacctttttcttgtaacagttcttctattcttaattctaaatgtccataattcatgttccgcacctctacataaagtatatttattaaatctttatgtagtaattcactatatagtgaggtactatacagtcagtcccttgttaataacacaaaagaggtatgtacatgaaaaagaaaatcatagcaacaatcacaatgctctgtttactgaccgttctctataattatctcagactgccggactatcatattactaacagcatatcctttagcagtgcagataccagagatactgaattgactgtaattgtttacaaatgttggaaaattgatggattaatcaaagacattgaaaatgaacataacaaaatcaatggtacgcctaccaccttggaaatcaagctctattatccaacttattacttgcacaataatagcaaaccattccgaactacaaccattgaatataataaaaaagaatagcactctattactgcttttgaagtagtatcggctattccctctccttatattcttttgttcgtattttcgcaaactaacgttccgcaaggatgcccagtgcgacggttcctaacagggcggcgggtcgactgggcaagtggtcggctgagaagcattttctactcaacgacatatttaacgtttgattctctccgtccctcatatttctcctgtgccaacagtttatcaagaaattctgacacttcttccatgtcttcactgtctatcaaatccagttttatcaatacatcaaggtctgtctgattcttcggttgtattgagatcggctgagatgtatccacaaccactttcaactgttttgtcttatttgctgtttcaatatccgtagttaatcccataacgtggcttttactcacgccgaatatctgtgataatttttcccatatagattcatctctcggtgttccgtttccattttcatagttcgtaagcatactttgtgaaatgcctaattcttttgcaagttccgcaacggttatattcttttctttccgcaattcttttattttattcatagcaaacctcctttataagcacattatatttcatcaaattttctctgtcaatctttttatcggatattcagatattttctattgacattctgcaatgcttgttttatcataagattatcttaatatctgataatcagatatctataaggaggtgaaacgatgattagaggaaatgactttattttaaatccagacaaactgcaagaggaatttcagttagtagaagtttctgactgggtagacttttctacaaaagaaaaattaggattctactatacagttcttcttccaaaattaaagtttgaaaaagtcaaagtaggcattaaagctaacacagcgattgttaccaacgaagaacttgaacaaaaagggcagattccagtctcatttgatggattacatacttgggctagtctctataatggacgtctttctgtcaaagcagaagcttccaatatcagaaaagtgggaatgaaataatttccctactatgtcagccagtcagtgccggacaacgtcataggtgctgaactggctgacctctatacttgatatataaaacaacatcttccgaaaacaatcggaacattcattacaaaaattgggatatgaggtgagattcgtgagcaaaacaaaagagtgttttgcatacaatacgaaaatcattgaaactcctactacaaaagaagtatatatttacgaaaaccctatttttattcactcgaaagaaaaggcagatttaacagacacaagtaaccgaaaaaaatttgatgaaatgtcagctcataagcaatatgatagtttaaaacgcaagcagaagcattacgaacaggctcgttgggatattgcccgtattgttgactgcaactttgataacaaaacaaaatttgtaacgctgacatttaaagaaaacattcaggaaatcctgataactaaccgagaatttaagtattttatccagcgattaaattattatttgtaccataccaaaacccagttattaaaataccttgcaacgtgggagaaacagaagcgtggagcaatccattatcatgttattttctttgattttccgtatatagcaaaagaaaaattacagaatttatggtcacatggatttattaaaatcaatcgcattgatgtagacagcaaagaaaacagaggtcgttatcttagcaagtattttggaaaagaccttgatttgaaagaacataagaaaaaagccttttttaaatctcaaaatctgaaagttccacacgaaacaaaagtcatgctgaccgaagacattttacatgacttacaaaaagaaaatatcgtctttcagaaagaatacacaaggcaaatttacgataccaacgctttcttatctactggttcatgcttaaaggacagcagtgttatctacatcaaaattaaaaaagaaaatccttgcgtaaagggggaatcttatggataatcccgttacgttttcagatataacattattgaatacgttagccacctgtgctaacatgaccacagatgaagtcttcaaagattttaaaattatggcaaataaaaaaatcttgaagaatcacaaatatgaaatttattactcggaatcagaaaaaagctggcgtacttatttacccgatgaaaccaaacctaacaaacgccgtcctgttaagaggaagagtaaagagaaccttgaaaaagaaatcatcagattttatatcgaaaagcagaaagctgaaaaccgtcagaatgtcacactagaagaattatatgctgaatggcttttgtataaaagagattatacttccgtaaaagcaaaaacaattcaagaatatgtatctgaatggaatagatttttcaaagatacagaacttgttaaaatgaagataggcgaaatcaaaccaatcacgcttatccgctttttcagagaagctacaaaagaccgacagttcacgcacaagcgagtcagtaatgcccgttctgttttgaatggaataatgagttatgcgatcgaagaagaaattatatcacataatcctgtctctgatgtgaatttcaaacagtttacctataagccagtagaagtacaaagtgacaatgtattttcccgtgatgatacgcataagttattaaattatcttcggtgtatcatagagtcatattctcttgcaatacagttatctttctatctatttatccgtgttggagaaacaaaagctatccgttgggaagatattgactacaataacaggcttgtatatcttcacagacaggcgacctgtgaacgtacattgaatgatgatttaacattctcaagccgaaaagtaaaagtagtaaatcaaatgaaaggaaatacttctcatggattccgtaaacagttccttacagacgaagcacttaaaattcttcacaaagcaaaggaattaaatccaaatggaatatatgtttttgaacctaacggtgagattatgacaacagacagctttaaccgccgattgaagaaatattgcaaagaagccggtgttccttatcattccagtcataaaatccgcttttacaatgcttcaacagcttttgacggaaataatcttacaacccttagttatttaatgggacatagtgagacagctacaacattgcattacttgcggaatgtcaataagaggaagaatgacaggcttgcttttcagaatcttggtatttcatcataaagtgttcaaaggtgttcaaacattttaaaacaaaaaaataagagaaacgctgtaaattcaacgtttctcctactttttactaatgccgcagaccggaatcgaaccggtacgggtatcactacccacgggattttaagtcccgggcgtctgccagttccgccactgcggcattcctcaaaatgctttcacatcttgaacgacccagaagagactcgaactctcgacctccgccgtgacagggcggcgctctaaccaactgagccactgggccaaatatttaattgtcagctcgctgccccttactacttccaagcagtttagctaaatggaccttcggggactcgaacccaggaccgaccggttatgagccggttgctctaaccaactgagctaaaggtccaattgattatttctgttcctaagaacaagccgatgatcggactcgaaccgataacctgctgattacaaatcagctgctctgccaattgagccacatcggcataaatgaccccgacgggaatcgaacccgtgttaccgccgtgaaagggcgatgtcttaaccgcttgaccacggggccatactttgtctgtcgacttcctcaacagcgattataatcatatcatataaatcaccgtttggcaagtacttttttgatatttttttaatttttgaaacttttcaaataattcgacaaatcgaacttcttagtttcctactcctgatccgataatcagagaataaaaagatcttacatttctgcaagatcttcaagctccccctgttggacttgaaccaacgacacttcggttaacagccgaatgctctaccgactgagctaaggaggaatatttaattaaaggttatgtaccttcaaaactacatacagtcaaaaccaacatcatcatccaaacctatcactgctttggttatgccctcgacctattagtaacagtcagctccatgtgttaccacacttccacctctgccctatctacctcgtcgtcttcaaggggtcttactaacttgacgttatgagatatctcatcttgaggggggcttcacgcttagatgccttcagcgtttatcccttcccggcttggctactctgctatgcctttggtaagacaacagatacaccagcggccagtccatcccggtcctctcgtactaaggacagctcctctcaaatatcttacgcccacgccggatagggaccgaactgtctcacgacgttctgaacccagctcgcgtaccgctttaatgggcgaacagcccaacccttgggacctacttcagccccaggatgcgatgagccgacatcgaggtgccaaaccactccgtcgatgtgaactcttgggagtgataagcctgttatccccagggtagcttttatccgttgagcgatggcaatcccactttataccaccggatcactaagtcctactttcgtacctgctccacccgtcggtgtcgcagtcaagctcccttctgcctttgcactcttcgaatggtttccaaccattctgagggaacctttgagcgcctccgataccctttcggaggcgaccgccccagtcaaactccccacctgacattgtcccccagccggatcacggctgctggttagaaacccagtactgcaagggtggtatcccaacattggctccatggcaactggcgttaccatttcctagcctcccacctatcctgtacatgcaataccgaatcccagtatcaagctggagtaaagctccatggggtctttccgtcctggcgcaggtaaccagcatcttcactggtatttcaatttcaccgggtgcattgttgagacagtgcccaaatcattacgcctttcgtgcgggtcggaacttacccgacaaggaatttcgctaccttaggaccgttatagttacggccgccgtttactggggcttaagttcaaagcttcgcttgcgctaacctctccccttaaccttccagcaccgggcaggcgtcagcccatatacctcacctttcggttttgcatagacctgtgtttttgctaaacagttgcttgggccaattctctgcggccatcttactggcactccttctcccgaagttacggagtcattttgccgagttccttaacaatgcttctcccgtcggccttaggattctctcctcatccacctgtgtcggtttacggtacgggtatcctgcaaacaatagcggcttttcttgacagtcagctcacgtgcttccctacttattttcagtccacatcacgtcttcagattaaagagcggatttgccaactcttctcctacctcgcttgtaccggtctttccattcccggctcacgctctctgcctgtgtccccacagttctgttacaggatagtacaggaatttcaacctgttatccatcgactacgtctttcgacctcgccttaggccccgacttacccagagcagatcagctttactctggaaaccttagatattcggccggaaggattcccaccttcctctcgctactcattccggcattctctcttcttaaaagtccacagctccttacggtactgcttcatccctttaagaatgctcctctaccaattgaattaattcaattccaaagcttcggcagtgtgttttagccccggacattttcggcgcaggacctctcgactagtgagctattacgcactctttgaatgaatggctgcttctgagccaacatcctagttgtcttcgaaatcccacatccttttccacttaacacacattttggggccttagctgttggtctgggctctttcccttttgaccacccaacttatctcggatcgtctgactcccatacatcatctacacggcattcggagtttgatatcccttagtaagctttgacgcccccttaggaattcagtgctctacctccgcaagactcgtatgaggctagccctaaagctatttcgaggagaaccagctatctccgggttcgattggaatttctcccctatccacacctcatccccacccttttcaacggatgtgggttcggtcctccattgccttttacggcaacttcaacctggacatggatagatcacccggtttcgggtctactccgactgactatgcgccctattcagacttggtttcccttcggctccggacctttagtccttaacctcgccagccagcgtaactcgccggaccgttctacaaaaagtacgcggttgagcatataaagctcttccacagcttgtaaacatatggtttcaggttctttttcactcccctcccggggtccttttcacctttccttcacagtactatgcgctatcggtcactaagtagtatttagccttacggggtggtccccgcatcttcccacaaggttccacgtgtctcgtggtactctggatcccgccatgtcaactcgtctttcgcttacggggctttcaccctctctggccggctttcccaaaaccgttctgctaaactcgttgaatcaattccgcggtccgaaccccagcatgcacgcacgctggtttgggctcttccgttttcgctcgccgctactcacagaatcacatgttgttttctcttcctccggctacttagatgtttcagttcaccgggttcccttccttaagttatgtattggcttaaggatacttgaggtttgctcaagtaggtttccccattcagaaatctccggatcaaaggatatttgctcctccccgaagcttttcgcagcttatcacgtctttcatcggctcttagtgccaaggcatccaccatacgctcttatcagcataaccaactcgacctcatcccacgggaatgggataatgtccacacatacatagcgttgtatgcgttggtgatagtcaatttattttaagtctgttttcttcagactgtaagttaatgttgttaacattacctcggatgtcttgattagatatttatctaaatctattgatttttactatatgcagttttcaaggtacataaagatgcgagcgtatcgaaaacagttgtacgtgacaagcttgcttgtctaagtgcaaatgcttttcgatgcattggcatgtaatgccatgagcgataaaaccgtaggttttagagcttcgcatcttgaccgactttcatcagtcattacatacacaaatctctttgtatatctaatcactggtgaaaccagctatcataacagcactgccctgctgattgggttggcggtgataagttgttgctcatctttgcctgtatctatatgttcaactccggcagcgtctctgccttagtttctttcttttaatttggcggccacctactctcccacaccgtctccagtgcagtaccatcggccgcttaggtctttaccatcgtgttcgggatgggaacgggtgttacccctaagcgcatcgccaccaaaagctttggttacttgataacccaacaatagacaacagtaaaaactctctacttctttcttccgttttagttggattgttccagacgaaagaaagcatttcttccttagaaaggaggtgatccagccgcaccttccgatacggctaccttgttacgacttcaccccagttatcggtcccaccttcggcagctccctccttacggttgggtcactgacttcgggcgttactgactcccatggtgtgacgggcggtgtgtacaagacccgggaacgtattcaccgcgacattctgattcgcgattactagcgattccagcttcatgtagtcgagttgcagactacaatccgaactgagacgttatttttgggatttgctcgacctcgcggttctgcctccctttgtttacgccattgtagcacgtgtgtagccctgctcataaggggcatgatgatttgacgtcatccccaccttcctccaggttatccctggcagtctctctagagtgcccggcctgaccgctggctactaaagataggggttgcgctcgttgcgggacttaacccaacatctcacgacacgagctgacgacaaccatgcaccacctgtcatccctgtcccgaaggaaaggcaacattacttgccggtcagggagatgtcaagagcaggtaaggttcttcgcgttgcttcgaattaaaccacatgctccaccgcttgtgcgggtccccgtcaattcctttgagtttcattcttgcgaacgtactccccaggtggactacttattgcgtttgctgcggcaccgaacagctttgctgcccgacacctagtagtcatcgtttacggcgtggactaccagggtatctaatcctgtttgctccccacgctttcgagcctcaacgtcagttaccgtccagtaagccgccttcgccactggtgttcctcctaatatctacgcatttcaccgctacactaggaattccgcttacctctccggtactctagattgacagtttccaatgcagtcccggggttgagccccgggttttcacatcagacttgccactccgtctacgctccctttacacccagtaaatccggataacgcttgcaccatacgtattaccgcggctgctggcacgtatttagccggtgcttcttagtcaggtaccgtcattttcttccctgctgatagagctttacataccgaaatacttcatcgctcacgcggcgtcgctgcatcagggtttcccccattgtgcaatattccccactgctgcctcccgtaggagtttgggccgtgtctcagtcccaatgtggccggtcaccctctcaggtcggctactgatcgtcggcttggtaggccgttaccccaccaactacctaatcagacgcgggtccatctcataccaccggagtttttacccctgcaccatgcggtgctgtggtcttatgcggtattagcagtcatttctaactgttatccccctgtatgaggcaggttacccacgcgttactcacccgtccgccactcagtcaccaaatttttcattccgaagaaatcagaataaggtgcttcgttcgacttgcatgtgttaagcacgccgccagcgttcatcctgagccaggatcaaactctcgttaaaagtgtttgtatccagttcagaaccaactaactagctaattcttccctttttactgttgttttggtttgtttaaaaaccgttcttaaaaatcttctcttaaagaaattttcaagggttgttgttgtctattgttcagttatcaaggttctttgcttgtgtcgttcttttcaagcgacagcttgtttatattaacatagctgtttttgtttgtcaagaactttttttaaaagttttatgagttttcataaaacaaacggagaaggagggatttgaaccctcgcgccgctactaacgacctactccctttccaggggagccccttcggccagcttgggtacttctccataaaaaacggagagggtgggattcgaacccacgcgccctttcggacaaacggttttcaagaccgcctcgttatgaccacttcgatacctctccataatacctaatcattgccgattagcaattcttattaagttgttgtcgtttcacttgcgacgctgataatcttatcataaggtagacctaaatgtcaacacctttttttcatttttttcacatttttttaattttctttgttttccttgatttttggggctttttccacactttacaacatcgaaaaatccccttcttttcttgatttgttcttaagtatctcgattctcagtcatgcttttaagcaagtttccttgacctgtttttacattttttgaaattaaggaataaacataagacagttcccttgtatattcctacagaaacgcttccgccacaagaagatcttccggtgttgtgatttttatattttcatatgctccgggatataatttaacagtatgtcccatcatctgctcgactaccatcgcatcatctgtcgcattttcgattttctcgttgattaatttctgataagcttctttgatcagctggatattaaaaacctgtggtgtctgaacaagccagagtgtttttcgctccggtgtgcctttcacataattcttttcatccacgactttgattgtatcctttacaggcatgccggcaacacatgcattcgtttcttccacacatcgataagcacgctcaatcatcgcatcatccacaaacggtcttgccccgtcatgaatatatacgaacccgtctttttctgtgatctgctgcagaccattccagacagaattataacgttctgcacctccggctacaattttatgcactttagaaaaactgtatttctctacaatttccctttggcagtattcttcttcccctgcgccactgacaagaacgatctcatcaatccacgcagaatcctgaaatgctttcagagaataataaagtacaggatagcctttcagcatcaagtactgtttatgaacttttgtccccattctttttccacttccgccagcaagaacaactgctgtacaatatttcttctccatttttctctcctgttattcacattaaatacaggattttgcaaagttattcacaactcatcacaaaatcctgttcatatctctttgttattcaaataactgatacgtaaatcaactatcttaacgttcacccaatttcaggttcggcacagcattcaaatcccatcccgaacgagttccggcaaggtattcataataagccgctgttccgatcattgccgcattatctgtacaataaatcggtgacggacggtagaatttcattccacgtttctcacaagcttcttccatcgcttcacgaagtgctgaattagacgcaactcctcccgcaatcgcaaatttcttcatgcctagtttttctactgcacgcattgaattacccacaagaacttctactactgccttctggaaagatgcagcaagatctgcaggatcaaatgtctcacctttcatcttacagccattaatataattcaataccgctgatttcagtccactgaaactaaaatcatactctgcatcatttacctttgcctttgggaactggattgcatccggattcccctctttggcaatacgatcaatctttggaccgcccggataaccgagcccgattgcacgagccactttatcataagcttcacccgctgcatcatctctggttcttccgaggatctcatattttccatattctttcacacatacaagatgcgtatgtccgccggatgcaacaagacacacaaacggtggctcaagatccggatgttcgatataatttgcagaaatatgtccctcaatatgatgcactccaaccagtggaatatctttcgcccatgcgattgcttttgcttcagccacgccaacaagcagggctcctacaagccccggtccataagttacaccgattgcgtcaatctcatctaatgttgtccctgcttcactaagcgcctctttaatcacctgattaatcttctcaatatgctttcttgatgcaatttccggcacaacaccaccgtataatttgtgcagatcaatctgagaagaaatgatatttgagcgcacttctcgcccgtttcgtactactgctgccgctgtctcatcacaggaactttcgatcgccagtatattaatctctttgctttcactcattttctatccctctcaatcttcaaacatcagatcaacagacattccatcctttccagctttcgcccgagggaatatctttttcacatcattcatataatgttccggctttgtaagtgacgggctataatgtgtcagccacatctcgccaacattcgcttctttcgccagttccgccgcttcataaaatgtcatatgcttatactctactgccttcgctgctttctctttctctccatacatgccttcacagatgaaaagatctgaatctttcgcattctcacgaatcgaatctgtcggccttgtatctgttgtataagtcagcttaattccttttctctgtggaccgagcaccatatccggtgtcaaaattcccatttcactttctacagtttctccgttctgtaagcgactccagtatttctgcggaatctcatttgcacgggcacgctccacatcaaacttaccggcgcggtcaatttcaatcgtataaccatagcaaagtacattatggttcacacgaaatgctttcaaccggtatccatttaactcaaatgtctgctccgctccctgaatctcctgataaatgattggaaatggcagttccggcgcaattacgcgcaggcaactgacaaccctttcaaggcctttcggtccgatcagtgtcaacggttccctacggtctgcatttcccattgtaagtagaagacccggaagtccactgatatgatccccatgataatgagtgaaacagatcacatcgattggtttaaaactccagcccttctcttttacagctacctgtgttccttctccgcagtcaatcatcagactgcttccgttaaaccttgtcattaaggaagtaaggaaacgataaggaagcggcatcatcccaccacttccaagcaaacatacatctaacataatattcctctatcttctggtccattacggtttgcccgaaactgcaagccagactctttcattcatctttacattcggttggaatgaggaacccctttgtaatttcatcaaaacactcctcgcacagatcaaaactgcagctttctccatcttttccagaaaaataaccccaggtatgctctacatgaagcatctctcttttcggaatcccactcacaacttttgtttcttttccacaccggttacaaataattttcgtaatttcttttgtttctttcaactgatactggcgcatacgttttcctcctgtgagcagcaattatgttgttactcatcattgtaatttacaaaaacggaatattcctgttttcttcctttgttacgcctcaattatacaaaacagttttcgcaatttccactggaaactgctggttatttatctatttccagactcatcagtactgcatcttccttcggatcctgatagaatgctttgcgaactccatcgtttacgaatccttctctcacataaaatgctcctgctgcctgattactttctcttacatccagcagaacctttgcaatctgatgttctttactccacgccttcaaagctagcattaatgcatggccaaccccctgacgtttcatctcatcaatcactgcgattcttgcaatctccacttcatcaaccgcagtatagccaagcagatatcctactcttttccctgctttttccgcaacaaagcagacactattgttctgttccagtgtctcgagaatcgccttctcgctccaggcatcagaaaatgactggtgctcaatctcagcaactacagcaccgtcttcaatcgtcatctcacgcacttctgtctttgcttccttttcacgctgagcacgttcgcgctctgcctgagacacacgcagataatccggcttatgcgcctctgctgtctcatattttcccgcataataatacgcaataccaagtgctcctactacagccgctctctgacggttcatgtatgatggggcaaatgaatacgggacttcaagtccctcttcaagcatctgacaatacactggtactccgtctcccaaaaatacaaccggacgtttatacgcattcagcttaccgatcaactcttctactgcaatcgccatctgctgttcttccacatgaaatgcagcctctgtcagatgtgttccatctttcacttcatgtgaaaatgaatacaatcctgtataaacctgttttcttctggcatccatgatcgggcagatcaagtcgccacatccataaacattataggccagtgcatccactgtcggaacatggatcagaggttttccgagagcaagtcccagtcctttcgcagtagcagatccgattctaagcccggtaaaagagcccggacctcctgacacagcaatagcatcaatgctggacagatccagatcgatcatcttctttacctcatcaatcatcggcagaagtgtctgcgaatgtgtcttcttataattcacggtatactccgcaattgtctgttcatcctcaacgactgcaaccgttgctgtcagtcctgagctgtctatcgccaatactctcatggtcttgcttccttcctctgtcagctgctgtaaaaatgttctctgtatcaacagccttctctttgttccattcttctaattttttatcgttattgttcctcgattgtgatccgacgataatcaaatccctgtgtcagatccttctcgatcagaatatttgtccgacgttccggaagaatctcttctatcagattcgcccactcgatcagtgagacaccttctcccatcacgtattcttcaaatcccacctcgtccatctcttcaatgtcaccgattctgtagacatcaaaatgatagaagggcagacgcccttcttcataaacctgaacgatggtaaatgtcggactattcaccggttcttcaatcccaagtccttctgcaagtccctgagtaaagaccgttttcccaactccaagatcccctgtcagggttaacacctgacctgagaatgctttttcaccaagacttttaccgactgcaaatgtctcttccgggcttcttgtctctattaccataatatttcagcctttctataccgccggttcttcaccaaaagtcccggttcttttatcatcttatcttaagtttctaatgatggaacagacggattcctgtaaatgccattgccatgccgtatttgttacatgtagcaattacattatcatcacgcacagatccacctggctgtgcaatataagttacaccactcttatgtgcacgctcaatattatcaccgaatgggaagaatgcatcagaaccaagcgcaacacctgtcagctggtccaaccatgctctcttctcttctcttgtaaatacttccggttttaccttaaatgtattctcccagacaccatctgcgagaacatccatatattcctctccgatgtaaagatcgatcgcattatctctgtctgcacgtccgattccatccttgaactgaagtccaagtaccttcggattctgacgtaaccaccagttatctgccttctgtccggcaagacgtgtacagtggattcttgactgctgtccggcaccgattccgattgcctgtccatcttttacataacatacagagttagactgtgtatatttcagtgtaatcatggaaatagcaagatcgatcttcgctgcatccgggatctctttcacatctgtcacaacgtttgagaagaaatctttatcgatattcagttcatttcttccctgctcaaatgtaattccgaatacttccttatgctccaatggtgccggcacataatccggatcgatctgaataatattgtaatttccttttttcttctgtttcagaagttcaagtgcttccggctcatatcccggtgcgatcactccatcagatacctctctcttgatcaggcgcgctgtatcaacgtcacagacgtcagacagagaaataaagtcaccgaaagaagacatacggtctgcgccacgcgctcttgcataagcacatgcaagtggagagagctctccaagatcatctacccagtaaatcttcgccagtgtctctgacagtggaagaccaacagctgctccggctggtgatacatgcttgaatgaagttgcagccggaagtcctgttgctttcttcagttctgataccagctgccatccattgaacgcatccaggaagttaatatatccaggacgtccgctgagcagcttgattggaagctctctgtcgtcgttcatgtaaattcttgaaggtttctggttcgggttacatccgtatttcaattctaattctttcatctgtctttacgctccttatttgttcttattcacgatctttgtctcatagttacctgtctcgatatcaatgtaacggacaaataatgacactttattttcctcattcaggctgttccacaaaaggtctgcaaactcttccatgttgtccatcgcctctaccagcttcggttctccctcaaagcttggaagcgggttgccatcatgcatataagtgtgaataaaatgagcttcaccggctaccggattctcgtatgcaaaagtatatctgttgcaactgtccgggtttccgttattactcttcaggattgacattgcataattgaaattaccattctcaatatgcatcacaccagaaatacgtggtgtgtagttcggaccatccggctcgaattctctagaacgaagagactgctcaaaagtaagctgcttatccattccttcataaatcgtatctgtctgatctccgtttgttacgatcgtcttattccccaatactctgaccggtgcgtaaataatcagacttgggtctgtaagcttcgatggatcaaatgcctgtgtacggattccctctccgtcctctacaaacacacggtttctactgttctcactgcgtcccataataaaataggcagtgacagccttctttccatccgggcttttaccaataataattcctcttcctggataagagttactcttaagttcctgctcaatcgacagcatcttcattgttgttctcctttcggtacgttcgctttcttgacaatctactagaaaaaaacgaaaaacttctcctaaaataatagattcaggagaagtatatcatgcacatgcttttttcgcaagtccaggcccggcagctattgaatgaaaaatcctgattttccgtagcttcggacctctttctattaaattctagtaactattcactctttttgatcaattctgtcatctcacctgccggaattccaagaacataattcatttcactcgaaagcgcatgttccagaagcatctgatatttcttatccatgcttgtcatgctgcctcttcgtttcgttcggctatacaatgtcttcagcactttgacccagttctcaggacagaagcttgaaatacaatccttgtattcctgttctctgtacttttcattctttacattcagtataccaacctctgcaagattatccagcagttccttcgctttctgctcacttaccggacgacggatgttcttatcgtcatcaatcggaacatacgccttatctctctgattgtctatggattgtaatgtataataatctttcttgccatccacaaatgaaaaatccagttttcctacttcttctaccttgtacactcctctgcacttatatacaactgcgtctcctctgctgagcattttcaaaacctcctgttctttttatttacactgttgttgtccacaatgtactgccctttttataacagactctacgtgtgtagtataacattttttcagtattattttaagagatttttaaattttcaaacattttcgtgattattgcataattcacatgcagctctatttgtgcaatttttagaatacttttgttgtccactggctcatatcccacacttcatcaaccacatcctgataaaattcaggttcgtggcagatcagaaggatacttcccttgtactcctgtaatgcctgcttgagagaatcctttgcatccacatcaagatgattcgtcggctcgtcaaggagaaggaaatttgtatctctgtttaacaacttacagagacgcacctttgcctgctctccaccgctgagtacacgcacctgactttcgatatgcttcgttgtaagtccgcattttgcaagcgcggaacgcacctgatactgtgtataagaaggaaattcctgccacaattcctcaatacaactattacggttttctccttttacttcctgctcaaaataaccaagttcaaggttatcaccaagttcaacacttcctgataaagaaggaatcaatccaagaatactctttagcaatgtggtttttccaattccatttgttccaacaagcgcgattttctgtccacgttccatagagaaattcaacggtttagataatggttcatcatatcctgtcacaagatccttcgtctcaaaaagcatcttaccaggagttcttccatatttgaaatggaattccggctttggtctttctgccgcaagctcgatcacatccatcttatccagctttttctgacgggacatcgccatatttcttgtagacacacgagctttatttcttgcaacgaaatccttcagctcgctgatttcctgctgctgacgccggtaagccgcttccaactgtgctttcttcaccgcataaacttcctggaaatgatcataatcgcccacataacggttcaattcctgattttccatatgataaataatattcacgacttcatttaagaacggaatatcatgtgaaataaggataaatgcattctcgtagtccagaagataacgcttcagccatgcaatatgctcctcatccagatagtttgtcggctcgtcaagaagcaggatatccggcttctcaaggagaagtttcgcaagaagcactttcgttctctgtccaccacttaagtctgtcacatctctgtccaatccaagatcaagtaatccaagtgcacgcgcaacctcttctaccttcgcatcaatcgtatagaaatcatgcagtgtcagttcatcctggatcgtaccaagttcttccatcaacgcattcatttcttcctcatctgctgttccaagcatatcacagatttcattcattctctgctccttctgaaggagtggatcaaatgcggatttcagagcctgacggatcgtcattcctttctcaagaactgcatgctgatccagataacctgcatgcacattctttgaccactcaaccttcccttcatccggtaacattttccctgtaacaatactcataaaggtggattttccttctccgttggccccgacaagaccaatgtgctctcctttcaaaagtcggaatgacacatcattgaagattgcacggtctccaaatccatgtgtcaggtgttctacatttaatatgctcatatcgctctccaatcgtattcttattttgtaactgttcagagccaagcaaaatttcaaaaaacaggtataaaatgcttgcatttttaaaactgtttttgaaattttatttggcggatacgccacaccgacgaaatgcgtagcattttggaggttggctctgaacaattactcttgttttcaattcttacttcttattcctgatgactctccagccatttcaccgcacactgtgccagacatgccacaccgatcgggcagacatcttcattaaactgtaccttcggattgtgtgccggataagttccccgctcatccgtataacctgctgagagatacataaatgtactcggaactttctctgcgatcactgcaaaatcttccgatgcacttgcactcacatctggaactggagtaaggcccggaatatccatctctttcatatatccaatcatttcgtccgtcaatgccggattgcagatcagcggcggaacttcggagatcatctcgatttccacacttccattatatacatctgcggtcttctctgccacttctttcattcggcgaacaagaagttcgcgctctttcgtattgtttgtacggatcgttccctgaagaactgctgtctctgggataatatttgccgcctcgccggccttaaactgtccaattgtcagaacgcatgcgtgcgccggatcagtctctcttgcaatcaactcctgcaatgcaagatgaatgtgtactccgatattaatcggatccacccccgcatgaggataggctccgtgagaacctttccctttgaccgtgattttaaatccatcaacagaatacatcattgtgcctttatcattatacataaaaagtccgaccggcatctttcccggagatacatgatacgcaagtgctgcatctaccttcggattctcaagaatcccatgctcaatcatattcttacttccctgaaatgtctcttccgccggctggaacatgaatttcacagttcctttcaacttgctttcctgttcttttaagattcttgccgcactcaaaagcattgctgcatgaaaatcatgtccacaagtatgtgctgtttttcctgttggacaggcaaatgcttcaccactttcctccggcatcggaagtccatccatatctgcacgcaggagaagaaccctaccgccatttccaagcgttgccgtaactccctctccgcattcaaccggatccagaccatactctttcaacttatccatcacataagctttcgtcttcggaagctcaagtcctgtctctgcattctgatgaatgtatcttctgtctgctactgtttcgtcttttaattcaagtgctctcttgtagaaatccatcgtgattgcctccttgtgataaatataattttctgcgcccattttcccaggcgcttttgtgattataacactattttgatgcttatgcactaaaagaatacgccccagatctgcaactgcttttttgcattttttaactatgctaaccactggacaggtgtctgcatcaacaaatatttacatcgtcatttccacactttccatctatatatggctaataacggaatccggatcatttttatcgtaacaaaccttgtctccttcattgatattgtttttataaagcagggcatcctctgctttcaccctcaattcttctccggatgaatctacaagtataaccactgccataaccggagcgtctttggctcgttcttcgcaaccaaaatctaaatcttcatcgattctctttactgtataaatcataataatttatcctttacttttcttatttccacgctttccagacatccggctgataaccaagtgtggattgctttccatttctgacaaccggagtttttattacctgcggattttcaagcaccttttccagcttatcttcatctgcaatatacttaatgagagcaagaagatctttgtcttttccttcccagttgatcatattttctaatccaccattcacctgcgcaactgaattgaattcacccttactcatacctttttctttcatatcaatgaactgaaatttgattccacgttctttgaaaaaccgctctgctttcttggtgttattgcatttcttagttccaaaaatctgtatgttcatttcattttcctcgcatctttatattgtcaatatttgtttattattacacttccttataatacaaacaaatattctgatatgtcccatctttcatacggaatccattcggtacagttccaatctgcacaaatcctaatctctcgtacaaatgacgtgcgtgaacattattttctaccactgcattgaactgtaaaatcttaaagtcatgcaactttgcctgtacaaggcagtcacttacaagtttctcaccgatatgttgtcctctgtaagttgaatccactgcataacttgcatttgcaaggtggccacagcgaccgatgttattcggatgcaaaatgtaaagtcctacaatttccccatcgttatctgcaacaccacaataagtctgtgatgcaaagaattctgcccctgtcttatcatccaggaactcttcctgtggaaatgcttcaccatcttctactacttcattccagatgcgaaccatctcggaaatatctttttctgtatattttctaattatcataatgtcattttcctcttctggtctaactttattgtactgttgaatttttactttttctatattctgttggagtcattttataactctttttaaatactctacaaaaataatctacattatggaaccctgtctcgtaagaaatcgtattgatttttttctctgtatttttaatcaacaatgctgccttcttcagccggtaaccaatcaaataattaatcggagtgatatgtaaaaatctattaaaaagattcaacaccgtacttttactaatattagcataacaggcaatttcctccaaagaaatatcttctgcataattctggtgcaaaaactgcatcataagctgcaagcgtgcctgaactgaaccggaatcgtccacttgctcttccatacacgttttgtcaatattttcataaatgatcagccataatttctgcataagaactgatgtaagcagctcaccatcaacttctctatcctgtgcagaaaatatttgcttcataatttctaatgcctctccttgccataacttctccctgtttaagatcaggtatgacaacgatgatgaaacaatcggttgaatatatttttgatagatcaaactatcttccggcgcaagaaaggacggcatacaaaggaaattggggatgacagtttcatcactggaataaaatttgtgcaaaatctttgaatttataaaaataccattcccctctgatagtgaaaacatcgattcaccaacacataccgtcatgtttccggattcgacatatacaaattcccattctgtatgccaatgccagtcaatgcaatgaaaatcaaattgtgataacttttcaaaatagcatttaaacggataactgtccgtcccatgttttgctgattccattaaattctcatctgttacaattttattttgtgccatatctttcctcacaacaacctttttattggatttacgatataatacaatatttatgtaatataagtcaatgttttttcttgttatctaatatataatacggtataaaaagaacaaaggagttttctgttatgccagattatcaaaaaacaaaagtggcatgttatctgggattcgtcactcaggcgatatccgcaaattttgcaccactattatttttaaaatttcacaatgattatgatatttcattgggtaacattgctttaatatctacattctttttcttcacacagcttttagtcgacttattttgtgcgaagtttgtagatcgaatcggttatcgtgtatgtatcgtaacttctgaaatatgcgctgctgccggattagttggacttgcatttcttcctgatctgttaccgaatccttttaccggaattattataagtgtaattatctatgctgtggggagtggattgatcgaagttctctgcagtcctatcatcgaagcatgcccgtttaaaaataaagaagcaactatgagcctgcttcactccttttactgttggggtgcggcagccaccatactgatttcgagcttatttttcttcctgttcgggatgaatagttggaaatggctggcagtcatgtgggcacttattccggcgattaatatatataatttcgcaacttgtccgatagaacatttagtaaataacggaaatggaatgggcatcagacagttattccgaactcctgttgtctggctggcaatctgcctgatgatttgttcaggagcatctgaattggctatggcacaatgggcatcagcctatgccgaagctgcactgggactttctaaaacttttggggatttgattggaccttgcatgtttgcaattacaatgggaataagtcgcctgatttttggaaaatatggtgaaaaaatggatttgatgaagtttatgacaggttccggaattctctgtgtgatctgttatcttttaactacattatcatcgaatccggtaatcgggttaaccggttgtattgtatgtggtttttcggttggaatcatgtggcctggaacgattagtattacatctaaaaaaatgccggccggtggaaccgcaatgtttgcattgctcgccatggccggcgatttgggaggcagcattggacctggtattgtaggttatgttacccagaattctgataataatatccgtgttggaatggggataggtcttatctttccacttgttctcttaatcatgttatttgttctttgcaaggggaagaagacgcaggaatcgcttcatacagtttaatttcagttgaagttgaatttcttatcctaactcaatcgattctttctctacataatttatactctctagatggaacgcatcaccttgcactcgtatggtctcaacgttccatctacttttccatcagagtaatttccaagcaacaattcatatgaatcccactcactctgccatacaactttattttcttcctcacataaattgcacagcacaacaagttttgttccttctaattctcttacatagccgatcacaccttcgctttcttcatctaaaaaccgaatggttccatttgcaataaacggcatttttctctgctgaccattgcatcggacatttcttctgattctttccagcatttcgtttcgcatgagatattggaacgtaaggtgcattatgagagctgattcaactaagcacctttcttcacggccaggtatttatgatagtatctagcctctttctgtattttctttcacgcttcgcgctcttcatcagacttgaagttatcttacttcgctttgaactctatccactcgttatctataaggacaactaccctgtcatcctcaataactgcataaggtgttcctaaatctctgttgaaattggcttcgccatctttttgaggtatgccgttttctgcataagaagtagtatattgaataacactctcgtccacttcaacaggaacagcatgatcagtggaatagtagttagtaccatttaccattatagttgcagggtagtcaccactatctgattttccacaccttgccaaagtaagaatacaaactaatgtcaaaactgatgcaattaactttttcatacaaacacctcgctattcacttttactatttccgtaataatattgccaataaaacaattagaactaatataattatcaaaaaaataaaccttatttgaccgtaaaatcctaatccgattcactgcaatactattattaacgcaaaaactaataacgcccagtaatttcttttcatgcaaatccctcccttaatgtcgtaacggcttgccttggaaatcaaaaaagcatcttgggatctcttaattcctcgttctctataccgtccaatgcaatttcaataatatgttcagagccaacgccattctccagtaaatatctcttaaagatggtaaacggcaaaaaaagattttccgcatttgcactctttttagtaatgatattctatcgtaaaacaaaatacgtttcaatattcattccttgtttatgtgtatatgcatatttttatgtaatgcactaataaaaatatgaagcaggctacactttctcctctatatcaagtgcatctgtaagcatccttgactgaatatcaactgttttcttaagcgcctgaagacgcttttcattgattgcatagccttgcaaaataaactgtttaaggacattatttgcccattttctgaaagctatacctcttttagaattaactcgatatccgacagacaaaatcatatccaaattataaattgggggttttcgtccccctgtacttctgtcggaaaaaccgacagaagtctcatccagttctcctgaagcaagaatatttgaaatatgttcgcttactgtagcgtgcttaacatcaaacaacacttccatttgtttttgcgtcagccaaactgtctcctgctcaggattgatttgaacttctatattaacatcaccatctgtaaataatacaatttcattcttcatccttcagttcccctccacgaatatttcccaataacacatctcatgtgaaacttccagtttgcacatccaatcattttcttcattctatcacagcatcatattattccgccatcaatttttcaacccaagtacccttgacaataataaactggtctgcgcctttccacccatgcttcaccggtaaatctgacctcatagttgctgtgatttttgctgcatacttgctacatatcccccaattttcatcacgtttctagacgtctcactgaatcaaaaggtaaagaaaaaccccagaaccgaagttctggggttttggatctctttgaattgtatttctcttgcgagataattatctctttgagaactgtggcgctctacgagctgctttgagaccgtattgcgcgagtttttgagctgttttcccttgatactccgggcttttccggctttctgcttctcagttatccggtgtgcggaccataaaatacggcctttttttcattcagcaatagcctgatgaaacgcaccatttactaccccaaacagctcctctggtttattgtacttcacttttgcatagatgtccatagttgttttgctgttttcgtgtccggcaaggtattggacggtctttggatcaactccagcatagagaagattggtaatgtaagtgtgccgcagctgatgcggggttacatcaaagtccagcgtatatctgattttgggttgatttttctgggtcatgcccagcgttggggtaaccgtgtatttgatgctctgtccattcacatacttataatagttccggggcttagtggagcggacaacgacatactgccacactctttgaaactgcgaagcagccagtggctctcctttgctgtcagcgatcacataatctgatatggaattttctttcgcttctctcagacaatccaccaaacacttcggtatcggaatatccctttttgccgccggagtctttagcacggtagaaaccacgggtctgttatgctctgtacgccatgcccgcctcaccgatagataaggtgtatcctcgtccagaaatacacaatcccattgcagtgcaagaatttcttcccggcgcagaccagaatacaaaccgagcataataaacaaatatggaggaagccccttgactgtatccagaagcacggctacctgctgatctgtcaatgcctctctcttttttgatggttttccgcccttgcccgatattcccgcacagggattgtgttcaagaatttggtttctctctgccgcataaaaaatgcacttgagtagcatattgaccttattgtataagccttccgatttctttgacaatggaacaagtgccagccgaatatcgtcagcggtcacttcttccatatacatctctcccagaggttttatgatatagtttgtcatatccctcgtataacctctgagtgtagacgcagacacctttgccgactgcatcagcagccacttctctccatactcggctactgtcgggtgctgccggtgaaagataatttcttccacctgcttccgggcctctaactgcttctcatacaattcttcacaagttgcggcatacaaactcaactctttgccatctgcatccgtaatcctggttctgtaatactggattcctttcaatgtaatggtcccgtacttcgggatctgtgttttcttttttgccatctttgatcgtcctttcttgataatgtgtagtctccgtatctacactctctttttatcagaaagcctcgacttaatcaaagatacggctgaggtaaaacaaagagcgagacatccttgcctcgctcctgcttcatttcctatttgttattactgtgctgcatcccagcttgcaaacgcacagttcattgatctgaccagctcatctggtctgttgtacttaacctttgcataaatgtccatggtaatcttgctgctttcatggcctgccaggtattgaaccgttttgggatctaccgatgcatgaatgagattggtaatgtaagtatgccgcagctgatggggtgttacttcaaagtccagactgtaaaccacttttccgttatgagcagccttttctcccaagacaggtgtgacagtatgctttactctttttccatcttcataccgataatagctccgctccttgaccgtcctcgtaacaatatactgccaaagtcgcttaaactgcgtgtaggacagcggttcgccgtcccggtttgaaaccacatactccgaagtcgatgtttcctttgctgttttcaaacactcagccaagcaaacaggaagagggatatttctctccgcagccttggttttcaattcgtctgagattaccggtctgttgtgttctgtgtgccatgcccgccttaccgtcagatatggagtatccgtatccagatatactgaatcccattgcagagcaagaatttcttcccggcgcagccctgcatataaaccaatcatgacaaagacataaggcggcaaatctcggatagcatccaaaaggcgtgctgcctgttcatctgtcaaagcctgacgatcctcttgtggaacaccgccaccttttgtcgtgagataaatcgtcgggttatggtcaatgatcctgctttccatcgctgcgcgaaagatagatttgtaaaggattaccacagatttataaaccgatgcagatttcttggaaaccggaacaagggcaagctgaatatcatccaggctaacctcacccatccgtttatctcccaattccgctataatatgccgcctgacctttgaggtgtaatccgtcaaagtagtagctcgtacatgaaccgactgcatcagcagccacttttcacaatactctgcaactgtgggcgttttccgatgaaaagtggcattctcaatctgttccaacgcaagcgtttctttgttgtatagttcttcaggtgtttttgcgtagatagctacgagcttaccattcgtgtctttgattctggtcctataatataggacacctcttttcataactgtgccatattgaggaagcattatttttctatttgccaatttctccacctcctaagaatatactccagcgctgtatctatgttttatcagaccattatgatttcgacaaggatacagaccggctcacactccagctctgcgaggtttacgataagttgcgttcttttctgctggctttgctctgtgggtgcattttgcgatatactcctgaaggcccgctgaagtaaagtacacacagccattctgcacatattgcacataagaaataagaccattgttacgggccgcgtccagcgttgcaatgctgatacctaaaatttctgctgcttcttttcgtgtaataagtttttccataaagcatatttcctccaatctgtcaagtttgtcatcgtgtttgttcaaagccacatgaatacgctggcagccgaaactgccagcgcatggtatctgattttgaacaggaagctgcaaacgcttcctatttatataactcagctttcatcacatttgccacgccccctgacgatgggaacacaacaggtcaccgctggcgcggctgtcataactccgcagcatcgttcgtatcgtgtgccgcagggttccccccaagtctttggcgggccgtgaggaagtatctttaagcccccatgcagtcatcgcgccgaatctgccacaatccgttttatgaaatcgtagatcgctccgaagaagtcttttcatcacctccctgactgctccatcttcgcggcgtttcatattcgctcgtacatgggttatgtacctgttgtgctgtctattcgattgtcaatgtactgatgaaggatgaaaacttgtccttcttattaacactgacaaaaaaggcaaaaaacaggcgcatcaaatgaaattttatcaaaaatattttacaagctgctttaatccacggcggatactctctcggacacggcttgggtctacaccttctacttcggcaatttcatttaccgtcattcccagatagtatcgggcataaattcgctttgcctgtttctccggcagcttcatcacagcggcatagacctgctcctgaaactgtttttcctccagaaccatctccggtgtctgcggcttcaacagcactgcattttcaatgccattctcgtaatccagagaatactgtgctttataacgatacatctttcgctcatacgcagcctccgcacgttcagctgctcgaatagtctccattactccctctgtcacatctacaaaaaagtctgttgtataaacatcaggataaagttcccgaaggttaattttcttcattatgtacctccatttcgattcacgggtgattgacgggtgaatcgaatggaggcggagaccgacaccggcagacaaccgggtcatctccgaaaaaatggcaacaaaaaacgccagatttccgtgagagaaaactggcgcgccaagaacagccattattatactgaattacatggaacgataatgccgatgcaatgttatatttgcccggaggaggagcaatgctttttttaactgatgtagatcatgtgagctttgaaaaagcaaacgagacacggcaaaataacctcccatcggctaccgtgtccctgcaagtcgtcataggtttgtgtaaacgcaaagaaacggcggctctgaaaatcaaagtcgccgtttcaaatgggcgtgtcaaattgtctgctctacgacggctttttttcttttgccgtcgtccggcagagtattattcaatatttaattcaatgtttccagtgaaattctcacattcaatgccaatataatttccaccatcaggaagtgtaattatgtcactataagttccggttgcttcaatcaacgtgactgcttcatcagatccagaaatccaaaatacttttgcagtaccttccgtaatctccaaggtgcaatcaatggacagctccttaccggcttctctctttatggaagttcctccgaacaaatactctgtacctgaaaagttcgcataatcagccgtataagtccctgtataatcatcaattcctttttctttttccccttgcagtgacgatttccctgtcagttctatggagcccgcagattgaacaatgttattgtaatgattgagaatttcatcttttgaacagccagcaagcataaaacttcccacaaggacgaatgttaatgctaaaactattttcttcataaaatcatcaccagcctttctttggagctacctttttggcctttttctttgtttgggttgcttctcgttctttcatgcacaaaatcaagatggcagaaataacgacagcaagcgcaagactgcaagaacaggttccgatattccagttgactgcggtatcatagctgcggtagcctaccattccaagacttgcggtaatcggatagaggtttgctaatgtcatatttcctgcggcaaacatccctccatatccatagacaaaagcaatgattacaccgactaaaaagctgcctgccctccgacaagtaagagcgataatcggcagaaccgcaagatataaaaagaaattaaccgcagtaatctgcaaagctgcttttagagctaaggaaatctcaaagccgggaaatcccacaatcatttctgctatgattgtaaacagactgcatatcagcccgaaaataatagacaatacaccgcacacaatcaattttccggtcaacagtttcttaaaagagatcggcacagtcagaatatttttcaatgtgtcatccgtctgctcacgataaatcatatatccagcaattaggctgatacacatcggaaaaatcatggacatattgtttttgatgacctgttctgtaagataggcaaaatcccaaacggaaccatcattcgccatagaggtaaacaaggtcagcaggacggataggagcatgagtgcaacgcccgcccaaaggatatgataccttttcaatttataaaattctgtttttacaatgcgaaccatgtttattcccccctctgcttatataatctgtcaatcagtaagaacgaaaccaatgccatgatcccaagaatgaatacaacttgaaatgttgagggaattagccctgtcatttgctccaagtccatttttattccatgagccgccatatctcccgcactccaaaatgtagtcagtggcgtgggcagaagccataacatagttttaggcagtgtgtcaaacaatgccgtagcactcatgttcagaacgctgtaaaagacacacaacaaaatggaaaaaacataggtcttactgaaaaagacaacaaggacaatcaacgggagtgttcctgccgtaatgaagatccccgtttcaaccgccaaaaacagcttataaccaattccataaacttctaatgttccaattccgcaaagaattgttgcaatggtagaagccacgcaaaaaacaattccaaagataaaaaggacaataatctttgcaagtaccatttgcgtgctggttacgggaattgtacgcagatttttgaatgtatcgttgtcgcgttccataaaaaacagaatagcggcaatcactccgataatgcagggcagtaaaaactggataccatatcccaacaccatgttaaatagtccatcgaaagcatctgcccgatccgtatatcgctccatcatagagggcgttgtcatcagataagtcagcgggattggaaacaggaacgcagccaaaataatcagcggaataaatttcttccgtttcaatttcaaaaattcgcatttgattagtttaagcaattccttcgccccctgtcacacgcttgaagtaatcttcaagactttcttcacaggtatgtgcttctgatacctccaatccgttttctacaaaagcagttacaattttccccacgggtagctccatattgtgtagacgcagattgtggtcgtcttgtatggaaaaatgggtttcatggaaattgcgttccaaaattcttgccgcctgtgcagtatcagagagcgtaaaccggatatgtttactgcttttttgctccaactcagcaaggctttcttcttccagcaatgcaccgtggtcaataattccaatatcgtcagccagcaaggaaatctccgaaagaatgtgactggagattaaaatggtttttcctcttgtgtcgcaaagctcacggataaaggatcgcacttctgcaataccgatgggatcgagaccgttgatcggctcatccaaaatcaaaagctccggatcgtgcatgactgcaagggcaatcgccaaccgctgcttcatgccaagagagtattgcgaaaacagctttttatccttgtaaggtagcccgaccaaatccagagcgtctttgatggcatgattgtttggtactccacgcagggtagcaaagatacgcaggttctccgtaccggtcagattgggataaaaaccaggggactcaatcaaactgccaatgcggggcagcaacttcttttcatttccttgcaaagactttccccagattttgacctcacggaagtaggcttcgttaaacccaacagcattttcatagttgtggtttttccggctccgtttctacccaacagaccataaattctcccacgcttgacatggatatttaagtcagccacactcttttgtgagccgtattgctttgtcagattttttgtttcaatgatataatttgtatccatattcaaaacctcctgttctgtaaggtattctatcatgccaaccttgcattaaccttgccgcaaccttgcattaaccttgcaatttgaaatccagtaaaatgacaaaggctcccgccataaagacgggaacccgcttaactatctaaaggaaaaagcaacataaattcagttccttttcccggcaaactttcaactgttatacttccacccatcttttctacaagctgatggacaatagaaagaccaagtccgctgcctttttcagagcgtcctttatcacacttataaagccgttcaaatatgtgtttcaaatcttctttctcaattcccactccattatccgccagcagcagctccatgttattttccttcttcgatagggaaattttgattttgtccgcatggctgtgagcgattacattttgaataaggttattgatgatcctcatatagctatccatatccaatcttacccggacaggctgttcaggaatatcaatgtcataatcaacctgtttatcctcaaaaatcggtatccagtcgatcagaatatttcttgtcagctctgcaacctcaacgctctggatctccaaagcaaactcgtttgaatttaacttgaaccagtcaaagagtacatcaatgtattctttcagatcatgggctttccgacgggcggtttcaatataatcatcccggtcttttcctgtgaccagtcctttgtgtgtagcgtcaagatacccaagcagagtagtaagaggcgttcgcacgtcatgggaaaggctcgtcataagctggcggttggtttcttctgtctgccgtacagttgaaagtctgctttcataggccacaacgatctcattgatttcataggcaagaggtgctgtcagttcatttgttgcagatagaatacgccggttgccatttccgtttttcacatcaaccagcacatcggtcatttctgctatttgtttttttacacgccgaacgagaacgatggaagtcaatacagccacaacagcaatcacaatggacaagaatacgataatttccatgctgactacacctccttattaaaccggtagccaatccctttgaccgtttgtatatactttgggcttgaaggattgacttctaattttttacgaagtcggctgataatcgccataatgttactgtcatcatagaaatattcttcgccccatacttcctcataaatctgctgtttggtcaaaattttcccttgatgttttgcacagtacaggagcaaatcaaattcctttgggggcagttcaaaagtgccgtttgatgtagtaacagaacgattttcaaggtcaatctgcaatccgtcaaaatttagcttttgtatggctccagcttgctgattaaagcgagtgtagcggcgaataagagacgcaatacgggcaatcagttcatccatatcaaacggttttgtcagataatcgtccgctccggctcgtaaaccccgcactttagaaatgctgtcatttttagatgtgaacatcaaaatcggcaagctgtactccttgcgaatttcttccagcgtttcaaacccgtccatgccgggcatcatcacatccagcaccacaagctggtattcctgctctcttaatttttgtaagccctcttttccggtattacaaaaatcagcttctatgttttctgcttgtacgctacgtttaatcaaagcgcacagttctctgtcatcatctataatcaggattttattcatggtgcaaccccttcccttgttttgtccttccgtcaatcggcttttctgcgttctttgggatcagccaaacaccagccatctttacagcgccggggatacgcccagcagtgcaatagtaatttactctacgaggtgtcacgccccatttttcggcagcctcttttagtgtcatataatccattatgcacctccacagagtacattatagttcttcgtctcgaacaatacaagtttatctgttccaacgcaagcgtttctttgttgtatagttcttcaggtgtttttgcgtagatagctacgagcttaccattcgcgtctttgattcttgtcctataatataggacacctcttttcataactgtgccatatgtactgacgaaggaggaaaacttgtccctcttattaacactgacaaaaaggcaaaaaacaggcgcatcaaatgaaattttatcaaaaatattttacaagctgctttaatccacggcggatactgtctcggacacggcttgggtctacaccttctatttcggcaatttcatttaccgtcattcccagatagtatcgggcataaattcgctttgcctgtttctccggcagcttcatcacagcggcatagacctgctcctgaaactgtttttcctccagaaccatctccggtgtctgcggcttcaacagcaccgcattttcaatgccattctcgcaatccagagaatactgtgctttataacgatacatctttcgctcatacgcagcctccgcacgttcagctgctcgaatagtctccattacttcctctgtcacatctacaaaaaagtctgttgtataaacatcaggataaagttcccgaaggttaattttcttcattatgtacctccatttcgattcacgggcggttgacgagtgaatcgaaaggaggcggggatcgacagcgacatacttcgcacgccttcccgaaaaatcgacagcaaaaaacgccaactccccataacgggaaatcggcgcaacaaaaatacctactattctgctgatttagatggaacgataatactgatagatagtcatactcccccggaggaggggcaagactttttttagctggtgtaactcatggctattgtgaatgacaaaaattgacacggcggcatcctcctatgtgccgccgtaccagattacagggtgtagggtcgtcgttcattttagatagacgaaaggaaacggcggctctgattttttcaaagccaccgttgcaaagtgcataacaatatagtcgctgtgcgatggctttttttcttttgccatcgtgcggcaactttttcacttttcttttatcttaacaggcaatcctcacagaaatgtcacggacatactccatttcgacaaaataacaagctgaaatctcaccaatctgtgagatttcaaattttttgaggaaagccgagaggaaatgcctcctcccggctttcaataggtttatgattatctattgtagcaatctctgtcgttactccgaagtcctcagccgctccaccacagttcccttgttaaagaagtggagaacgatcagcggaataaccgcagccagcagcagataaagcacaccaatgaccagaaccggaaccaatgtaatattcagagtaaagaaccacatggaagggccattcaatgcgctctttagcactgtgactgccaggatcgctgcgactgctccgccgataatgtccgcacctacggcatagtagatgccctcatagaccgtcaagcggcgaagctgcttgccggtcataccgatgctctgcatggtagcaaactcatggcggcgggtgatgatgttggtaataatcatgttggcaaagttaatcagtcctgcaaaggccatgatgcaaccaatcagaccgccgataaccaggatcatgctgcggaccgaatcaagctgctctttcaacagcttggtggaagtataggcaaccgaagtattttcactcacatagctgctcaaaaattcttccatctgcggctgcaaggcttcatccacattgaatccataagtcagcagcgtgggagcgtcatagatttccttaaatacagtgtccggcagatacacaaaaggagcatcagcggcgatgtgcgcctgggcggtggtgcctgtcggcgtttcggtttccgttcccacgaggatcgcttttgcaaggatagtgctggttttgaccagttccccatccttgtagaaggaaatgctctctccaacctgtaactgatcggtcagcggagtgttccttggttcctctgtcagtttgtccatggggcagccaataatgacatattctccggtagccattttctgcgttaaggtttcggcatctttttcgccttcaaaaatacgcatatcagcccagaaattttcggaggcccccatcacattgccaaaatagcgcctttcggtatcagaacttgtgtacagactatatccctgatagctttgatttacgacgccttcttcctcatgggacagctctatgccgcttaaatcttcaaacccatagtcaaccaatacatttctatcgtcttttgtatttcggtaaagatagcgttcatcctcaactccgggctgtccggcaatcagatccaccgcctgttgtgagagcgtatctttatggtactgaacgctttccattacattaaatgcggctgagttatagacattaaaatctgttctggtgacacggtttacccacttttcttcatcaaggctttgcgtcacaatgatgatagagttaaacaggacgatgcacagaagcagggaaataatgatgaacgctgaacgccgacgattgcggcccaggttggaaaaggccatacgggacagctttaccccattggttcgcttggcacttctctttttataggcgttctgctcagtgtagcgaatcgcctccagaggagaaatctttgccgccttttttgcaggcttcctggtgctgataaacacggtcaggattgtaaagagagcggcgataacaaaaattagcggcgaggtcgatacggatgtacccaccatagagtattcaaggttaatgatctctgtcacgataggaagcagcacccaaccggcaaagaagccggcgatcagaccaataggcagtccgatcagcgtgagccagaccgcctgacggttcacaatgcccttgatctgccgtgtggaagtgccaatcgtccgcagcaggccgtattgacgaacatcctgcatcacagaaatatcaaagatattgtagatcagcaggtatccgcacacgacaaacatcaggataaatacaacagcaaacacgatggactctgatgaagtcaatccctgggacatttgattttcagaggcgagaatgaaattgtctgcgcccatatcctctggattgccgccaatggagtaaacgaactcattcaactgctgctgaacatttgctttattcttcagcacgacatcggaaaaagtaacgccggacatttcatggtctaccgcataagtgttctggaccacatcggggttttcctttataaactgctctgaaacagtcgcaacgctcacagagtcattgcttgcttcccaccagccggaaagcaccatatcataatgataagttttcccccgcagttcaaattccagcggaaccgctgcgccaatctttggttctacccccaacgccttcagcgccaaatccgtggtggcgatctcattcgctttctccggtgcagctccgtgagtaggcacacagaaggtcagctcctgctgcacactgtccgcataattgatctcaatggaatggctggaagtattgcttgcatagccaatgatgcgccggtgacctgcctgctccacaaaatcgctgtttacaagctgctcgtactgttcctccgtcatatatcctaaagtgccatccgccttgctgcctttctgcatttgcagagagagctggatggaggacgccatattgaacgccaaagaagtgatagaggtaaacaggaaagcagtcagaatgattgccaacagtgcagccagattgcgtaccttattcttcttgaaatagcgtttggatagcttagtaattactttggaattattgttgccaaataaaatgtcattcatagtcccacccccttactgtacgatcttgccatcctcaatccgaataatgcggtcggcaagctgggcgatttcattgttatgggtaatcattacaagtgtctggtggaacttctggctggttactttcagaagccccagcacatcactgctagtcttactgtccagattgccggtcggttcgtcggccaagacgatagcgggctttgataccaaggcgcgggcaatggctacacgctgctgctgaccgccggagagattgtttggcatattgttcagcttatcctccagccccagtatctgaacgacttctttcataaacttcttgtctatcttgtttccgtccagctccacgggtaacacaatattttcgtaaacattcaacaccggaaccagattgtagttctggaagatgaagccgatctttcgcctgcggaagatagtaagctgctcgtctttcaatgtagagaggtcgcgcccatccacaatgaccttgccggaagtaggcacatccagcccgccgatcatgtttagcagagtggatttgccgctgccggaggttccaacaattgctacaaattccccctgctcaacagagaggttcacaccatccagggcctttgtgatattcggctttgtgccgtagtattttttcagttcagtcgtttgcaaaatgctcatagagaacaccatcctttctttaacttagacccattgtaacgaacaaacctcacagaaatgtcacgagccacaaaaaatttccgctaaattcggctccaaatgtcacaagttcgtgacatttgaaaaaccgggagaaaaatcccccggtttttcgtgccccacagtcgcatacaacggcgtaggaagtattcacttgatatggctgtgcctgttattcatttacccgaagccgctctacaacacttcgattgttaaagagccggagtgcgacaactggaacgataaatgccaatgccaaaaacagaatcagcataatcagcgcaggcagcaaggttatctggaatgtcatcatcatactggtaggaccattttctacaaatgctcttagcaatgtcatgccaagtgtcgccgcaactagtgtgccgacaatcccagccagcagcacataagagaagctttccgaaatcatcatttttcggagctgccggttcgtcataccaatgctttgcatggtggcaaactcatgacggcgggtaacgatattggtcataaccagattgatgaagttgatcaggcccaccaaagcaaatacagaacctatcattccgccaaccagcaggacaacatttttaattcctaaaacattagccttcagcgttgtaatagagttataggaaacatcggtgtcccgcatcagatagttctccatatcctgctgatactgttcctctacatcaaagaggaaaccatacaaggtaggagttttataaatctctttgaaattatcttctgacatatagatttttggtccgccaacatctgttgcaatattagagccaccgccagtcaaggtcatttcattgctcgtaacagcagccttggcaatcactgtaaactcctcagtcggagctccattttcataaaactgaatggtgtctccaaccgacaggccaaaataataggtattatccgcaccaccgcttaattctcccttatcgttatagttgcttactaaaattacattgttgtcattccagagtttttctttcaggacagacacatcgctttcaccctcaataatgtccatcttgttcaggagattttcagagaaaccatacacatttccaagtggaaggttatccgcagtcaacgcagcataatcctttccatcctcatactcagtccagccgagatttaatgaatcaggaagtacataggcatatttatccgtattatcaatcgagaaagaaggcccccaatcacaggcaatatgatcgtcctcaaaagtattcctgtataggcggacttcgtttattacacctggctgctgttcaatttcctctactgatttttctgaaacagtgcaactatgtccaaattcatctccccatgcggcttgaatgtccgggttataaaccgcaaagtcacttttggtatgggttttgacataaacatcttcatcaaagctgccgctgaagataaacacggagttcaggaggacgatgctcaaagtcagggaaatcacaataaagaccgtccggcgcttattgcgctgaaggttggccttcgccatgcgaggaataactgctccggtatttgtctttttccgctttatggaaaccgtattctgttctacatagcggatagcctcgataggtgacacacgggaggctttcttcaccgactttctggtactgatataaaccgtaagtcctgagaataggatcgcacctgcgataatgcccaaatatggaagtgtgctgacctcaatatttttaccactataatcggcagcaaacatctggagtgccgcaggcagaatactgcgtccgagcaggatgccaaaaagcaagccaaatggtgttccaatcaggaacaggtacagcgcctgccggttgaccaaacgcttgatctgctgggaagtagtccccaccgtccgtagcaggccatactgccgaatgtcgttggtaactgcaatctcgaatacattatagatcagcagatacccacagaacatgaataggacgccaaatacacctgctaccagccacatgatagagccgccgctgttgttggaaaggaaagtgttgggggctacacggacataattctcagcacttctatcgtctggattaccgccaatgctgcggacaaactccgagatgcgctcctttatcatggagctatcccgcatgatcacatcagcatcataaatgccacaaccctcacgcccttgggcaatttcgttcatcatctccggattttcttccatgaaggctttggaaacaatgactgattccgatttttcgtttggtgtgtcgtaaataccggatacaatcatatcaaaatgatacatctggccgctttgacgattcttaaattcgataggaatttctgccccaatttcttcttcgatgttcaaatcattcagaatgttggcagaaaccaaaacctcatttgctttttggggcgcagaacctgtgcgcggcgtctgcatccgaagctccaactgaggctgatctgcgtaatcaatttccgcaaatatccggttggtgttggtcataatctcaataggtacccaacagcccaccttttcaaacatggagttttcttttaactgctggaattgttcttcggaaagaccctgtaccagcgcatccgcaccagtgccaatcatctttgccatgttgtattccagcgttcccttggctcccataccaatggtcaggactgccgtaaagagaaaggttgtcagggcaatcgcaatgaccgcaatcacattcctcattttgttgcttcggaaactgcggtttgccagctttttgatgacagccttgttgttattgccaaatagaatgtcattcatagtcgcgaccccctttactgaacgatcttaccatcctcgatccgaataatgcggtcggcaagctgggcgatttcactgttatgggtgatcatcacgagggtctggtggaatttctggcttgtggttttcagaagccccagcacatcggcactggttttgctgtccaggttgccggtgggttcatcagccaaaacaatagcgggctttgacaccaaggcgcgggcaatggctacgcgctgctgctgaccgccggagaggttattgggcatattgttcagcttatcctccagccccagcatctgaacgacttctttcataaacttcttgtctaccttgtttccgtccagctccacaggcagcacaatgttttcaaagacattcagcaccggcaccagattgtagttctggaagataaagccgatttttcttctgcggaaaacggtcagttcctcgtctttgagtttggacagttccttgccatccacgaccacctgaccggaggtaggtacatccagcccgccaatcatgttcagtagcgtggatttaccgctgccggaggttcccacgatggctacaaattcgcccttttctatggagagggtcacaccatccaaggctctggtaatgttcggctctgcgccataatattttttcagttcagtcgtttgcaaaatgctcataaagaacaccatcctttctttttgataaacccattgtaacgaccaaacctcacagaaatgtcacgagccacaaaaaatttccactaaattcggccccaaatgtcacaagcctgtgacatttcattttttcggggcgtgcttgctctactttcggagcaggaaaacagaaaaggttgagcctttcccaacttccgataccacccggatatagccgccctgcaaggtcacgatctcgcgggccagatacagtccgatcccaataccgtccacatcatgcaccgcatcttcccgataaaaccgtttgaaaatcgtcccctggtgctgctctgaaatgccgatgccggtgtcagcaatgtcgatcttcacatacatttcccagccttccaccgacacacggatctgcccgcctgccggggtgtacttcactgcgttatccagaatgttgaacagggcttcgcttgtccattttctatcgtggcgcgcatccaaatgctccgggcattccacctgcacatctatttgtttcttttcggcattgagcaaaatcccgcccagggcagcggcaagggtatcataaaccggctgctgtttttgctccagcgaaatgactcctgtttccaggcgggaagttttaatcatggcttgcatgaggaagtccagcttatcaagctggctggcctgggctgtcagaaattccttttgcttctgcggggggacctcgttttcaagcagcgtgttgttgatcatcttcaagttggcaatcggggtcttgacttgatgggagatgtcagaaatcaactcttgcaggtcagcccgttcctttgcgatgctgtttttattttcctgcatgacctcgtacagccgccccagccggtagttgattttatagaacaggctttcttcctcaaccgtctgcttcggctgcatatccccggagagcatatcatccatctgaccgcaaaaggcatcggagaactgaaccagcttccggcggatcagcgccacaaagaagatgacgcagagcagcacaaagaggctgaacaggaacacacaccggacagcgattatattccgggtcagtagataaacagtggtgcagactgcgcccactgccagcagcagaagcgttcccaaaagaacgcaggctttattgatggagagtttccgcatattcatttgagcgcccctccgatccacatatagcccatgccgtacaccgtcttgatgtactggcgtccatccgtttcaattttattccgcacccggctgatagccgcggtcagggcgtgttcatccacaaagttcccatcggcatcccatagcttttcaagcagcacctgccttgtcaaaacattctgcggatttttggtcaggattttcaacagccggtattccagcggagtgaacaccagcgccttaccggacagggaagccgtcatctccgagaaattgatgaacagcgcaccgtcctcatagctatcaccgccgccagactgtttcgccagccgccccagcactacggacagctttttttgaaagacgctcatgggaaatggcttggtcacatagtcctccgcgcccagctcatagcctttgagcatatcgctctccatatcatttgcggtcaggaagatcactgccgtgtccggccgacgatcctttacctcacggcagaaatcaaagccgtttccgtccggcaggtttacatccagcacgatcaggtcatagtcctgcctggtcagaaaatcactggctgctgattttgtcagggcagagtccacaacatagcccgcagcttccagattatagcacaaagtattattcaaaagtcggtcatcctcgactactaaaattcgcattgtatcacactccttcattcttagtgtagcatccaaatgtcacagaaacctcacgagagaattatttttttgtatttttgaaacggcggtctgccggtctctctgcatccttgggaatcagccaaatggtagccatcttcacagcgccggggatacgcccaccggcgcataaataattgatctgccttggagtaacaccccatttttcacttgcttctttcagcgtcatataatccatatagtttccccccaatatggtttattatatttcctttgctcgaagaatacaagcttgcaaatggggcgcaaggccctgtgccagaagcactttgagaccttacgcccattgctattctatcctaaaaatactttgccagttgcttcagaccgcgccggatactgtcacggacacggcttgggtctacaccctccgctgcggcgatctcactcacgcgcatacccaggtaataccgggcatagatccgcttagcctgcttctccggcagagccatcacagcggcataaagctgctcccgcagctgcttttcctccagaagcatttccggtgtctggggcttcatcagaatcgcattttcaatgccgttgtcgcagtccagggagtagtacgccttatagcgatacatcctccggtcataagcagcttccgcacgctcagcggttcggatcgtctccagcacatcttctgttacttctacaaagtaatcatttttataaatatcgggatataagtccctaagattgactttcttcattatgtacctccatttcaattcacgggcgattgacgagtgaatcgaaaggaggcggggatcggcagcgacatacttcaggagctttcctgaaaaatcgacaataaaaaacgccagctccccacaatgagaaactggcacgacaaaagcacctactattttgctgatttagatggaacgataatgccgataggaagtcatacctctccggaggaggggcaaggctttttttaattggtgcagctcatgggtgctgtgaatgacgaaaattgacatggcggtatcctcctatataccgccctcctgattgcataagcatcgtcggaaaagcaaaaagaaacggcggctctgattttctcaaagccgccgatccataggcgcgtggaatgtgtctgcttcacgacggctttttttcttttgccgtcgtgcggcagattagatagattattttccttttttctttttatcatcaagagattttttcaaaatatcttgatgaatacgttcttgcaacctatcagggtcagataagttaatgttttaggcaacattggtcaaagtacattttatcaatttatctaaatcatcattcgtgtccgattacctccttatgccacttgatgtttacagtaggaacgaactgcaagaaacaagaaaattggaacttcaatcgctgcggaaattaaaattatatgcggtgtccaaaaactcattccaccaatatgcaagtagttaaaattgataagctgatacaggaaattgttctgtatcccaattccagcagaggggagaatggcagagatccaatttacgcctaatgctgtgtaagcaaaaaacgggacaaggattacaacaatagagatcagcaacaccgatagtgcatctttgcacttagcggataggaaaagtgtgcagcaaatgcaactcacaatagacagcaaccccgccagagcaaggtaaatttgtagttgacccaaattgatattaggcaggttgataatggaaaacagcatttgcatagatgtttccaaacaatttgtaccaaatgctaagtttgagatcagtaggtgcagagtaatcccaatagcaaatgtcacgaccgaaatcgcacaagatgccagtattctgctaactgctagtttcaaccgaccatgctttgtacagcgcaagatgctatcggctccgctctgatactcaccagaaaaagcaggagcagtaatggcaacacacaaaatcgccagaaccatgatataaagttcaatgtaatcaaaagcatctctggaaagccccgcataaagctggaatggcgtatcaacctcggcatacttgtctatgctctgttgctgcgcttttggatggtttcgctgctcatttttcataacatctgataaatgggtaacgcaacgctgataatagttttgtgcgacatcttctggatcaatatccataaggtcagctccaattccagtcagcggatcagcatacagttccggtaacgctttgagtaatgggcgaataggtacaatctgtttaatgctgacagaaaccgggaatgtatcactctccagaggaccatattcatttattaaatcctgataagttttcaatgcctcccttactttttcaggagtaacttcgccatttatagctgcgtatagatcacgcttatattcgattgcttccataccatcaagttctgtttttgttccgtctggatttggacgattgatagactcaaaagcaatcggcagatatgccatagcagcggacataaccagagccacagcaagcaagataaatgtgcgtcgtgatttcaggacacgctttacttctaaacaaaataaacgcatattattttccctccctttcgacatcttcttgtggaaacagccataaatacaaatcttccaaacgcggttccgcaggaatggaacccgctacctcagaatgatctgcaagataacggatagatatttgattattgtcctcgccacgctgattgataatccgcagacgcatttcatagtccatcatcttatgagcaggaaccacacagctccatactttatcctcaatctgttttaccaactcgtttgtcgttcccacatcaataatttttccagctttcataatcgcattacgagttgcgatatattcaatatcagaaacaatatgggtggaaatcaggacaatacggttatgtgaaaattctgaaatgaagtttctaaaccgcaccctttctccgggatcaagtcctgccgttggctcatccataacaaggattttagggtcattcagcatagcctgtgcaattcctacacgacgtttcataccgccagatagtttggcaatctttttccctttcacatcggaaagggtgagaatatccagtagatggttgattttctttgttgtttctctgggcggcacatcctttaatgcagcgacatattccagataatccttaaccgtgaaatcgcgggaatagccaaaatcctgtggcaaaaagccaaagatattgcggtaatccgcacccatcttgcgaatatcttctccatcaaaagaaatactcccgttgctcggttccataatatccgcaatcatccgcataagtgtagttttaccagctccgtttgcccccaacaacccccatacgccagttgtcaatgtaaggctaacatcatcaacagccatcttatctttaaaccgcttgcttatgtgttcaattttcaattccataaatttgctcctttcgcttaaacaaaaatctgcccttgttcagtaaccattgtaccgaacaagggcagaacaatctcaaagattgtgtaggaaaattcctaagcaattcctaagattatgttctatttttcctaagctgaaataggcaacacaatcacaaaggaaatagtttcgtttttactggaagcagtaatcgtaccgccatgcagatgtatgatttcttcggcaatcgaaagccccaatcctgcaccgcctgtatcagaaagccgggcttcatccaaacggctgaatttttcaaatatgctgtcaagctgctccggcgcaattgtctttccatgattttcaaaaatgatttgaatattacggtcagatctctttgctgatattctgatttctgttttggggtagctatatgcagccgcatttctcaaaaggttgctgaatactcttgccaacttttcaggatcgcctgttacagacaaatcatcatccgctttgaaaaccgccgtattgccgttggcggacagcgttgggtatatttcgtcaattacctgtgcaattagacagtgtaaatctacgttttcccttttcagtacaactgtatgtgcgttgtattttgtgatctcaaacagttcgttgataagtttttcaagacgatcagccttatcaagtgccaccttgatatacttttccttttgcccttcaggcatatccggagcctcatgaagcaaactcaaataaccgattaccgttgtcaatggggttcgtatgtcatgggccagatacatgatgatttcattctttttattctcggcttgttttgccgcctgtttacttaatagaacagacattttgatttggtttagctggttttccaactctttaagtggttctgataaagccaccgcatgatcattctgttcataaacagtttgtgttgcggaaattacctcgtccaaatatccccacggttttttccagaaataattaaaaatgcaaacaaaacctattatcaagtagataatgagaatcgcatcaatacgcaaatagagccacgataagatactgttattgaattttgaaaaaatgtaatccagcaggataaccagtccaaatcccactacagtatatagaaccaatgacaggtacaagcgcacactaagccgcttttccgtagtcgttcttttattcaatatggcgtacctcctatcaattcaaaaacaaaataagtgccaaaaatccaacaacaacgacacttacaataacagccagaatgaaaaatagtttatctgctgtttctctgtttttaagcaatcgagccatcataccatatagagcaagtcctaaaagaccacccataaaatttgtaatcagatctgtgatgtcagaccgtccgattgctaaaacatattgagccacttccaacagcaggcttgttccagcaataataatcagtttaccatgaaaccgacatttaggcagaagcatttgcagatatatacccatcgggacgaaaatcaaaagattttcaaacacttcttttaggtgaaatactgttccaatttccttgtcgtaataaaacgggatgagatttatgcttcttactgtgtctaaatcattgatattgaattgcaacttgaataatattatccaaaccaaaagtgccagataaatcaaaaaaagaactgacaccaaaaatttttgctttcctttcatgtgttctcctttcaaattttatagccgactccccaaattgttttaatgtattttggagcatcagaagtatcttttaacttttcgcgcaaatgccggatatgcactgtgatagtgctactgtttttggaataatattcatctttccatactgcatgaaataaatcttcaatactcacaaccgttccggcattttccaacaaaacattaagaattgaaaactcggtcggagtcagtgacacattttcaccatccaataggcattcatgagtctgtgtgttcaaacgtaatttattgtatgaaagttccagctgtatttttgctacgcttgtggcaggagagtattttttgtaacgtcgcagctgtgctttcactctagcaactacttccaaaggccgaaacggttttgtcacataatcatctgctcctaatgtcagccctgtaatcttatccgtttcctcaattttagctgtcagcataataatgggataagtatatttttcacgaataagctggcacaaagaaaagccattcatatctgggagcatgacatccagaatggcaaggtcaatatcttcgttttcaatgcagggtattgcatccttagcacaataatatttataaacaacgtagttttcattttgaagatagacttctaacagatttgctatatcccgttcatcgtctaccaccaacactttttcagacatatatttcaactcctttttgactttatatttgattaagtatagcaggaataaagttttcattctcaatgatttacatgagaaattattaagattttcctaataccttatagcgcctatccactggctttcccgcctcttttggcaacagccagacaccagccatctttacagcaccggggatacgattctccgtgcaataatagtttatctgacgggtggaaatgccccatttttcacttgcttctttcagcgtcatataatccatatagtttccctccaatatggtttattatatttcctttactcaaagaatacaagcgtgcaaatggggcgcaaggccctgtgccagaagcactttgaggccttgcgccctttgttattctatcctaaaaatactttgccagctgcttcagaccgcgccggatactgtcacgaacacggcttgggtctacaccctccgctgcgccgatttcactcacgcgcatacccaggtaataccgggcatagatccgcttggcctgcttctccggtagagccatcacagcggcatagagctgctcccgcagctgcttttcctccagaagcatttccggtgtctggggcttcatcaggatcgcattttcaatgccgttgtcgcagtccagggagtagttcgccttatagcgatacatcctccggtcataagcagcttctgcacgctcagcagcacggattgtctccagcacatcttctgttacctctacaaagtgatctgtttggtaaacatcgggatataagtccctaagattgactttcttcattatgtacctccatttcgattgacgggtgaatcgaaaggaggcggggatcggcagcgacatacttcgggagctttcccgaaaaaccgacagcaaaaagcgccagttccccataatgagaaactggcgcaacaaaaatgactatgattcttctgctttagttggaatgataataccgataggaagtcatacctccccggaggaggggcaaggctttttttagcaggtgctcgtggctattatgaaaaaaggggaaaattgacacggcgatacctccaagataccgccgtatccttaaaaaagggcgactttaatacaccctccgtattcttatttttcaaaagaaaacggcggtctgaaatttgttatttcaaaaccgccgtaaggctactgtattttgttttggcgcacgaatatccagccaccgaaacaacggtttttttatttccgctgggtggctatattcttatcgtaaagtttacagaaaatcttctacgcgatgctgttctattacttcttttccaataagtgtaatcgccctttgaggacactggttaatacaccgatagcacatggtacattgatcatgagcctgaactctattatcaattatagaaatgtttttcatcggacaaagccctgcacactttccgcaacagatacaagcgttaggatcaatatgtaattgatctgtgtatgagcgtgttttgttgtaaaaccatagtctttgtcctaataaccccgcaatatggtaaaacacatttattccttcctgtgggggacggttctcttttaattgatgtgacgcttttattaacttatttgtggcatcttttataagctttcgattttggggtattgacctttttagcgtcttaacatcacaaatacaatccggcattttaatgtgaagccctcctatgatatgagccccatattttttcaccagtctggaaccaagtccagctccatccccactaaatagtcccatagtcgcaataaaaaaaatccttttcccataccatacggtatggtttttcacaataaaatctcggacaattttggggagattactataataaatcggatatgcaaaaataatttcttgatgctggtttatagcctctaaaatcgaattatcttctatcgaaatgataggagaaccaggagcatatactgatacaaatttctttatacaatattccgtatttcctgtaccgctaaaatatattccaatcattttagtcctctgttattttcaaaaatgaaagagcaaaaatatccatataatcaattactttttgtttccagtttccattataagaaacattattcattgttgccaatgatgtcagtccatgtatgaaagcccacaatgcaataatgacatcaatttgtttttctgctggatagtttacacggttcaacagtttagaaacaacagttttgtaaatgacaaacggccgaaagttttctgcatctgaacccaaaaaagttaggtctatttttgcattggattgagaatatatgaacgaaaagtaatgtggattgtctacgaaaaacgaaacataagcaacccccatatttttcaaaagctctggagtgttttcataattgaggataacctgatccagcatttgcgaaaattgatccgtaatatgttgttgcatagcatccaataattcttctttactctgaaagtggctatatggagcggcatggcttacaccacaggccgcagctactttacggagagaaaaggaatgtaatccttcggaattaacaatttcaattcctttttcaattagggcgtttcttaaatccttatgatgatattgctttttaggcataactgtacctccaaaaatctttacactgtctacattatatcttattatctttacactgtcaagttttgcagtgtagataattcaagatatatattaccggaaaatgtaaaagtaaaatacagtgtaagtctccatgctaaaagcaaattaggattttctactttgacattaaatgtgttcgttatgcaaattcttgttgcactatacttttcaattttgtaatcggtataatcaagcctatcgaccggcataataaggttattcctttgtgcaaatcggcacgatagaatatacttgaggtgagtgattatgccgattgatgatttaaccgctttggggcaaaaaatgcgggaagcccgaaagaaaaaagacctgacacagcaagagctttctgatctgagccatgtatctgtcaagcagattgccaacatcgaaaagggaaagatgaatccgtcttacttgattttgaaggcattggcaaaggtgcttccgctctctctggacactctgatcaatccagatgtttctccagaagatgagggcgccaatcagatgaagatgctttattgcagctgtccgtcagaaatgcgtgaaaccctcttgcaccatacgcaggagaccgcgaaagaactaacagaactatccaagaaatttgaaacgaattgagccagtgagtgaaatttgacggtttcctcactggctcctttcatttccgggtaaaaagaggcaagcaatgccggtgttaatacacaccgacccgcagagcgcaaaatccctccgtgattttcctctccgcttgcttgttgagggcagcgcccccaagcccctttgaacacagaatttcattctgtggctgcgcgttctgcgaacgcttttgaccaggaccagcttaccgctggccgtggtctttttctttttcaacatcctgttctacctccattttcaggacccgatccacattggcctttgccgttaaaagctcccgcatttcttcacgggaacgccggtactcggcataagtctttttcttttcttccaacaatttcgcgtactctgtctgcaactctttgaccttgggcagcttcttgacgcccatctcatcaaaggcatccttagcagcctggtggagcagaatttcttcctcatgttcctcccggaatttcttagagtagcccgccttgcggtatgccacatagacctcacgggtcttggcataatttacgatgtgagtacgcagaacagcaatctctgccatgcgcttttcagccgctttgatctgcgccgaaagctcattgtgatgtgccgtggcagccgcagccttttcttctaaaatcgcatactccagcagattgttctctgacaggtaattcatggtctgcgccatttgcttcagattgaaaactttggcccaacgcgcatagccagcaccttttcctgcctgcaattttgcctgaatgtccaccagcagattgaccttcggcggctctgcctgtgtgactgttttctttcgtggggtatgcgctttcttcccggagagaaccgcctgcaaatcatctaatccatatccttcgcccagactgtccatgcgggcggctttctcccaaccagggagcttcaagcgatacgatttcccgcgctttgatacttcacagccggactcttgcagcagcttcaacagttcctcaaaattagcaggactttgtgataatgcgttgtcaatcgccacacgaagcagctctcggtgggatggctttgcctgatcgcccagccatttgttatagctctttccatgagggttcggattctctacaatggacagtccattctcaatgcagatggtatcacttaaccggcgaaccgccttagtgctgccccaaaagtttcggaatttccggtcatattctaagctgaccgatgaccagataatgtgattatgaatgtgcgacttatctatgtgggtgcagaccacaaaggcatgattgcccttggtaaatcgcttggcaaattctacgcccagccggttagcttcttctggggtaatctcgccggggcggaaggactggcgcacatgataggcaatcacatcatccgcgccgcgcactcgtcctgtggcggcaatgtactgccgctttgccagaagaaactctgcatcagcagtccggctgtcacacgcatagccagtaatgagcctgccgttatctgttttctttggattggccacatagtcgatgatgtcactaatcgcccgactttctgtgcggcccttgccgacatgaagcggcatgattcttgtggttgccataggtcagacctccttcccgaaaagaaaacggcctgccgtagcagaccgtcttgtgttaattatctgttttgtatcttatgacaggaatctgttttacttttttgccgatcgtttgcctttccagggcaaagaccatgtttggtgttctttcaaaaaagccttcatcctttttccaactcataccgcatttacaatgctgcaaaccaataaactgctgtttcattttcctaccacaattcggacagattttgttgttagcacccatatcattcttccagcttataaaaatcgtccaaatttaattcatgcttcaattcttcttctgtcggcagataagtaaaatattttgatgcaaatatctggtgattatcttccggcagcgtgtactttacaatggagtcgcctttgtctgcacaaaggacaataccgataggctgtgaatctccctcattcatcatttcacgagtataatagttcacatacatctgcatttgtcccagatcttgatgggtcagttttcccatcttcaaatcaatcagaacaaagcatttcaaaatgtaattgtaaaatactaagtcgatgaaaaaatcctgtccatccagcgtaaaccgcttttgccgtgctacaaaagaaaatcctcgtcccagttccagaagaaaatgctgaaggtggtcaatcaatgcctgttccagttcaccctcatatacatgggtatctggctgaatctgcaaaaattccatcacataaggatctttgattattttttcatattcaggtttcggttctgttgtttgaatttcttttgaaacagctgctttgtcttggcttgctaaaattctctgatagtacatcgtgttgatctgccgttctaactgccggacgctccacgcagactttacacattcctccatataaaaggttcgtgcctgctcatctggtacacgcatcagaaggcggtaatgtgaccaacttaattcgctccacagtgtggagcgatttggaaaggtgcaataaaattgcctcatattacgcagtccttgtacgctaaatcccttcccaaattctgctgttagctgttcagataaatattgaagcagcttctttccatattctgctctgtcattttctccgcacgctttataaatctgttccccaatctcccaataagttattaccattgtggagttcaccgcagcacttaacctatgctgtgctgatacaatagactggcgaatggaatgataggtctgttctgcattttgatttatttgcaaattgttatccattttgtactctccttactgtggatgctattaaaatattataccacggaatcaataaaaactctcaaatcaatatttatggattgatttttgcattttttctgcaaaatcttcaattaaaatctctttcggttctttttctgagtgacaatgacttcaatctgtctttctatttttatcataaaagcacctccaaatactgccgtaaaatcttttccaccttaaacatcccagcatattgcattaaagctcgcaggttcttatcttttctacgagcatacgctttcaatgccccctgaaaggtttgaatttcaattctacttcggcttctgagcaaatcacagatcgttcgctccatatcataaaccggtacggtatgcccaaaaggtgtctggccgctggacaccccaacatcaaataactctggcttaatggtgtaaacagatagcccttctgcttttaagcgagtggtactgtaccccctgcgcactgtgatggcgtatggagagggttctcggtctgttaagtcatgaaaaaataatgctgattcatgggaaaatactgcttgaccacaccgcagatgcaaaagaaacatcgcatcaatccatgtatcctcggagacataaataccatgggcaacctgttctaattttcgctctttaatatattcataaaaaataggttttacaattcctctggcaaccgcctgagaagtttgtagcatcccgtcctgctctgccagaagaccatctagctgtgcaaaccgttccaattttgtcatgccatcacttcctttcgtgctactatcatacatgaatgtggcacaaaagtaaatatacaaaagagaacatcttttttgaaaaaattaaacactattatattagagttcatccatacacactatcctttttgaaagatgtgaactacaacttagtgggtgacatccaccaagttacccaccaagattctgcaccttcagcagtatttgaacagattttgactttctgcacaaaacacaagtcaaagaaagagcttatagcattttgcagcttcaaagatctaagaaattttacgctgaagtataaatgtgaattactatcttagtcagaaaaacttagtcagcaaccaagattgtgaccaagttagtgagcaagataaaccacaggacatcctacacgcagtcttggatttttgtataacagaaaaaagcaaacaagaaatttgctcacttattttacaagaaaatatttgaatcctctactggcaagcggccagcttaaaatgactattccagataagccaaacagtcgaaaacaaaaatatattaccgtccataccaagtaaaataagaagcagggcattgggtctcatatcccattgtcctgcttctttttcattccagattatattcacatcatttacccatacacctatcttggatcgcaaatttcaaactctgtaccttgcccagcagccagatcgcagccagcggcagccccatcgggctaatcaaaaatgccatgaccagcagaatcacaccgttctgcggagaataggtaagcagcacagccacgccaagcagagcaatcacagtgctgaacagaccaagcaccagaccagatatgtagatcagccccgtgcagagccagacaaaaagcgtcagcaccaaaataaccggtgcggttacgatcatcagcaggcatttcaaaatcttcattccagttcctccttccaacgctccagataccgtttgcacagggcatccgcttctctctcatcatcttccgtcacttcccgtttgcctttggtcagttcaatctccagataagtccggtaatcatcagctaagaggtcgaacagttccttgggagtatggcacacctcgccggtgcaatagtgaaagttctggtcaaattcaacccttacacatccgtgacggctgatataaacttcgatggtctcgtctgcggccaggtagtccgcaaaaatctccaacactttttcaaaggtcagcatctgttttccactcctttgctacgcttcttattctactcatattatccggtacagacaggcaaaagacaaggataccggcaaaaagaaaaagcggagggaggtgcggcgaagaaacgccgttcctccctccgcaaatggagtatctatccctgttatgaaagtttagaaagctgggtaaggatttccttcacaccctcccacagttgttcctgccgctgggatatatcctccaagtcagcatcataaacccgccctgtctcatgcacttttcgggtcagctgattcaagttgttgctgcttcggcgcatcagggataccagctccttcagttctggcagatccagcttgaccacatacccatccagcgccattttccgcagataggcactcaaattctctgttccgtattgctgcatcttttgatgaatcagctccagttcctctgcggatacccaaaacagaaccggaacatcccgctttcgctttgccatggttatcgctccggctcccgtttcttcggggcggccggcttatgggcagacaactcctgcctgagcttttgcaggacggagcctttttctttctcctggatagtttttcgagcctgtcttgtaaacagatccaccagtcccggattgacccgatccactaccagatcggcacattgctgggaagtagcactatcctccggcattggaatggtctttgcccatgctttgttgtcacgagaaatccgcccatctgcatccttatgctgaatcgtattggcgagaataaagttcatccgctctactccaaattcctccaaaatctcttgcaccgcggaagcagtatccagcctgctatccctataatgggcactgattgcctgctcaatggcaactttgcaagaaaaatttgcctggtcagaaagccagtatgcgtctgtttctccatgcttggacgcgtatgcggcagaatgaagataaaccaacaacggattgagttcctccggctccctgcatacctcattggcccgactttcaatgctgtccctgatcacatccatatagccggtctccagcttgtcaaaatagcggtacacatcttctagcggcgaaggagattccagaagggcctgtgcctgagcatcggtcagcaccagttcctccatcgccatcacaatgtcctcgcggatggtgtactcataggcatggtttaagacttcttccgggggctggcttttcagccagtcccggaacttgtcctgttcggcagccatcttttcataaagggctgtattcagatcgttggtattcatgttatcgcacctcctcatgctgttttggtttcttgtctgtactgcggggcagcaccgggcgtttcaggctgtccagcaccgaaggccgtgtgcttttggcaacaacagcttcagcgtgtgccggtccctttccgtcgatgttgagcagggtatccagctctaccagacgggcgtttttgcttctcagttcttcttcataaaggaatggctttccgacttcctcctttgcggcagcctgctgctgacagaggttatccagctgtgcctttgctgcctccagacgctgcggcatctgggcgagggcattgtcgatacgggtaagatttccgcgggggtctgtaccaagggttgccctgtgggtcatctgcccttttagcaggagcgtatattcctgtttccatgcggaaaattccacggacatggcataaccccgatagctgccgatctgcaccggatcagaggttttgacctccttgcaggcatccaaaagggctgcaccggcgttctccttatcggtcagcaggtctccacggatctccataccggaaaagccgtcctccgggtgcgggtgagccgccaaaacctctaggtcagattcaaagcccttgataaagcccttgtgcttttcaatctcctccggaaagtatttgagcagttggtcctccagacgatactgcttgctctggtggtcggctttcatcagcttcaggcgggatacctccacatccaaatccatacgctctttgatacgggggtctccggcacacagagccttgatctcggcaaaggaaagcgctgtttcatccacatcttcgcaggagcgcaccggcgatttagaagtcatgatctgggaaatgaatttctgcttattctccaccgtctgccagaggtatgcgtcaaaggttccttcggtcacatagcggtacacatggacaaggggattctggttgccttggcgctcgatacggcccttgcgctgggcgaggtctccgggtctccacggacaatccagatcatgaagtgccaccagacggtcctgcacattggtgcctgcgcccatcttggcagtgctgcccataagtacacgcacctgaccggtacgaactttggagaacagctcctttttccgcacttcggtattggcttcatggataaaagcgatctggtcggcaggcatcccctggacaatgagtttctgacgaatatcgtcatataccgtaaatgccggttcctgctccggcagaggcacagcgccttccaatgcgtgaagcagtggattatccagtgttttcgccgccttgcttgcaggagcttttgcctgtggtgtagaaatgtcgcaaaacaccagctgggtcagcttgtcagcttcgccatcccgccagatctgcatgatgttctctacgcactgattgacctttgtgccgggttcatctgggagcatctggttgacgatcctctggtcaagccccagcttacggccatccgaggtaattttgagcatattgtcctctgatgggtcaacgctgccgctgtgtacctgcgatgcgcgctccgaaagggccttgaccatttcctgctgatgttcagtaggctgtgccacgatgttgtggtattccacttccggggtagggagatttaactgatcagcagtcttaatgtcggccacttctttgaacaggttcatcagctcaggcaggttaaagaacttgctgaatctcgttcttgcccggtagccggttccctccggtgccagctccaatgctgtgacggtctccccaaatcgggaagcccagcagtcgaagtgggtcatgttcagctcttgcaggcgttcatactgaaggtaacgctgcatggtgtaaagctcggtcatggaattgctgaccggggttccggtggcaaaaatcacgccacggtttccggtgatctcatccatatagcggcacttggcaaacatatcggaggatttctgcgcgtccgatgtggataagcctgccacattccgcatttttgtgtatagaaacaggtttttatagttgtgggcctcgtccacgaacagccggtccacacccagctgctcgaaggttaccacatcgtcttttcgcccctcggcttgcagcttttccagtctggcttccagagacttacgggtacgctccagctgtttgacggtaaaacgctcgccgccgctggcctgcacctctgcgattccctcggtgatctcgtcgatctgttcatagagaagccgttcctgacgctcccggctgatggggatgcgctcaaactggctgtgtcccatgatgatggcgtcatagtccccggtcgcaatacgggcgcagaacttcttgcggttatgggtctcaaagtcctttttggtggtgactaagatgttggcggaaggatagaggcgcagaaactccgacgcccactgctcagtcaagtgatttggcaccacaaagagagatttctgacataagcccagtcgtttggcttccatcgctgcggccaccatttcaaatgtttttcccgctcccacttcgtgtgccagcagggtattccctccatacagcacatgggcaatggcattcagctgatgttcccgcagggtaatttccgggttcatgccgccaaaagtgatatggctgccatcatactcgcggggacgggtggagttcatttcctcgttgtactggcgcaccagagtctggcggcgctccgggtctttccagatccagtctttgaatgcttcccggatagcctgctgcttttgagcggccagagtggtctccttagcattaagaacccggcgttcttttccgtccgcatcctcaatggtgtcataaattcgcacatcacgcaggtttaagctgtcctccaagatcttgtaggcattggcacggctggttccataggtggtattggcagctacatcgctataaggaacagaagtttttcctgtaatctgccattcagcggtaaaggacgagtaattgacctcgatgctgcgctggagatagtacggggtacgaaaggtttcatacataaactgctgaatatattccttgttgatccatgtagcacccagacgcacctcaatctccgacgcatccaggtctttgggctgggcggcagtaagggcttccacattgaccgcataggccgggtcctgttctgccgcccgctgtgcctgacgcagtttgcggcgcacattgccggaaaggtattcatcggcagtcacataatggggcgatccgtcctgctccaactttcccggtacacgaaagatcacgccttgcagttctcccgccagttcttctgttgtttttccggtcagccggctcatatagctcatatccacgcaggctttttccgagatagacaccgccagtgcttcacttgccgtatccaccacagccaccgcctgatggggcttgatggtccgtttggtgaacatatccgccttgcgttccagctttccgtcctcgtcgatgacttccagcgcacagagcaggtaataggaagaatcatctgcataggccagacggtttgcacggtcattgatgagaccgtatttggcagaaaagctgtcatagaggctgttcagttccgactgcttctcccgaatggtgctgtccggaaccgctgcgtccatctgaaggtcgatcagttcctgcacacaatcccgcagtcccacaagacctttcacacgggcttcggcggtagcgttgaggtcagggcacaccatacggctgttttcccggtagtacacctgtccgtctacaatggcataggaatagttcttcacattggggtcggcaggaatggaggtgtcaatggcttcgccttcgcccagctccggcagctctgcttcctgataaatgccatgaatatacttcacagcatcatgcagctggtcggaaagctccaatccctcaatggggttcacggtgtaatccataccatgagcagtgcttaccggctcctgtctgcccagcaccatttccgggtggtcgataaaataccggttgatgataaacccgtcctctgtctgtccggtctgggtccattccggcacgatgtccagcgggcggtcccgcttttgcaggaaaatgatgtccgataccacctcggcaccggcattctttttgaacgcgtcattgggcagacggatcgctcccagcagctcggcacgctgggcaagatagcggcgcacggtggaatccttggcgtccatggtatagcgggaggttacaaaagccaccacaccaccgggacgcacctggtccagtgatttggcgaaaaagtagttgtgaatactaaaattcagcttgttgtaggctttgtcattgacctgatactgaccgaaaggcacattgccgatggcaaggtcaaagaagtcacgcctgtcggtggtctcaaagccgcctactgtgatgtccgccttgggatagagctgctttgcgatgcgcccggaaacagggtccagctccacgccatacagacgactgtttcgcatttcctccggcagcataccgaagaaattgcccacacccatagacggctccagaatatttccggtctcaaatcccatacggctcaccgcttcatagattgcctgaatgaccgtagggctggtgtagtgggcgttgagggtggagcttctggcggcggcatattcctccggggtcagcagctctttcagctgggcatactcggaagcccatgccggtttttccgggtcaaaggcatcggcaaggccaccccagcccacataacgggaaagaatctcctgttgttcggggcttgcctgctgtccggcagcttccagctctttcagcaaacgaatggcattaacatttgcctggaacttggtttttggaccgccttcgcccaaatgctcatcggtaatgcggaagttctgtgcattgcggcgcaggttagccttgtattcctcataggaggcttcctcggaagctttggcattggggaaggtctgccactggccgttgacctgaatggaaaccgggtgttcatccagcacttcctcaaaggttttctccggctctgttgcaggggctggcggctctggctcctcgatatgcagccgttccaccaccacatcataaggcagatggttcttatcgcccggatagacggccacggtctcggaatgaaaggctggggattcgacagacggttggggctgttcttgtccaaagccatccagctgacgggcatacatcccgcgcaacaaaggcacaacctcatcccagcggaaatatagcatagccagacgcttttcctctgcatccatgacttccagttctatgccctgtgccgtggtacggtaatcggcaatatcgccggtctccagattcagtgtctcgatctcaccggaataggctctgctcaaccagtaggcgatctcgctgttgctcctgccggattgcagcagcgtggaaagctgctgtttatccgcttcatccatgagtccatgggccaatacatcccgcaagtcttgatctgccttgtccgggtcaatggaaagaaactcggtatagtaagcattgcggcggtctgcccgaagcagctgctcgaactgttctttgcgctctgcccgataaatgggatataccatgccggtgggcagaagctgtacggtgtcatccctcagctcggtgatctgataggcgtcatcctcgatatacacggtatcacccacggcataaaccggggctgcagggtcataggaggttctttgcggagttgggcggcgaactgcatcatattcctcatcggaaatggaaacatcggaagtctgttctgtctcggcagctgcaatctgctcggcatccgacatcacctgttggataaacgagtcattgtccagtttttccgggtctgccacctgtccgttgacgattcctctttcctccagggcttcccggatggcgatagggtcgatattgtcaaaacgatcctgttcttcttcggtatagaaccggtcctcctgaatcagctgggcaagcctgcgctgtaccttcggccagggcagctgtgtttcctccgggctgccggcacggacaacgaacgggctgttgctgccaccgtattcctgagccagccatgcagcggtatccttctctcttgcatggtctttcatatagcggacgacagcgtgtttactctcgatattgccgttccaaacacagagagctctgtcaatatcctcctgagaaagaggacgcagtaattcatggagctttggataggtttcgtcgatcacttcccggtgcaggcgctggcggaactccggcacatccgaataaaggcggatcagctccatatccttagagccaagaaccgcacggcgcacagcggcattgccctcgatgacagcattttcacggtcagaatgaccgcaggcatttcgatatgccacatcctcagatatggcggcagtcaccacaggcttatactgctcaaactgctcccgaagggtaggctttggcgtttcttcctctatctccggctgctgggcatgaatggcatcttcttctgccagatccttttcagcctggatcttgtcatactgcgcttgttcctgttcggtaagatagcggcctttctggacaagtgaggtaatgcgcttggcaaccttttcccagttcaagtgaacatccggacagtcctgctttttatagtgcagtcctttcccatcgtgatcttcgccgctgtgtgttgcgccggacagggcatgagagcgtccgccaatgccatactcgtctttaaggaatctcactttttccttatccgtatggttttccatgaagaacgcatagatacggccttttcctccgacaaaactgctgccgccggtcatggcggcgtcgatctcatcctcggtaatgaaatgctggacggttggcacttgggaaaggtccgaagaaaaagtcctgcggggcaggtcaaggtctttcaggttctcccagatttcccttggcctatggtaatgaaagcgcaacaggtcacgatcctgctgataggtagtccagaaggcagcgtattcttcctttagggtttggcggaaagccgggtcactcagctgctcggcaagccatgcagtttcttccgggaacccggttctctgaatacaggacagacaggatagatacccggaatctctggctttatcgctgaaatcgtggtacagatgccaaagtttttctgcaaggagggagcgttcatagcctgccgcttctgcaagctccacattggaggcaaactggccactttccaaaagttccccgatgcgctctgcggcgctctcccaggaaatgacctgggcagacctgtcataacggacagacttctcgtgggaaagatggataccatcctcagcataccatgcgctcacactaccaaggccgttgccgccgtggtacagcgttttcagtatctcggcaatctcagcggtggttttctgcttttcaaaggctgcaactacacgctccctctggcggtctgtattgccgcccaagcgcagtacatggtcaatgtcgttttgggcaaaagaaaaagcagaggatgtatgcgctacattctctgcttcatctatggattggatctgttccgcttcggagaggaacaggtttagggtcagctgttgataagctccgccatcaggatctcctctgcctgggctttgcaggtgttcatcagccccacccacttcatgggatcgctggctttcagttcctcggtggctcctgcttccttcgccagctggggtatcatctgctccagtctgttctgggcggtctcgtcgatctccagaaggtgcgggtacagcttctcgctcagcagcatctggttgtagaggatgggacggtgttctttcaggtaggctttcctcatccttccgtacttgcccaggggtttctccggctgctggctcagcttcaggtcgggaatcagatagtctccgttctggatgtaggtcatgggattgttcatcttgcttgctcctttcttggttggcttcgcgctctgcatttcggacggtaacgccgatctgccgcagcacctgctggttgatctggctgaccgctgttcccagcgccccgatggtggacggggtgttgaaatcaaagatcgccatgaaatcttcgtggtcgaagtagcgttccggctccagtccgcagcgggacatcaaagcgtaagtgatgctgacggtggcggctgccttgaactgcactccgatgttatactcatcatattcctccaaaaaggaaccgtcaacgatatagaagaagtcctgctgatgctccgtccagtattcctcagccagttttccggctacctcagtgagctgtccggcaaggtcatcaccggaaacatcatagatgcgctccagcatggcctgcaccgaatccagatggcgctcctccagctgccacagccagggagtgcgggaatgttcacgggttccggtgtcggaaatgtcaaagacatagcgcaggcgtggtctgtccccggaatcgtccaccagagcgatccccttggaaccgcgccttacataccggcccatcttttcattccacaaatcgtactctgcacaggcggtagcgtccggtcgctgggcatagatcatcagctgctcatggaacgggtacttgtaaaggcgggaagcagtggtgagaaactctgcccattcctgccagctccccgtgagctgtgttgccaccttgtccgccatctgtgcatatagttcagctttggttggcatggtattctgtcctcctttcagttttggggtaaaagaaaagcaggaaacctaaatgatttcctgctgggtgaaactgtgaatattacattttagttatttaatatctcggcaatcgtgtttggtgcatatttattgagttcatgtcctgcatttggaacgatgtgcaaagtagcttgtggtagtaattcttttagctgcttagaagctttcagattggcagtatcctttttgccacacaaaattgtcactggacaaagaatattgtttaattgcgaagtaaaatccaatgaccgcatagagtgagccaattttatggtgctgctttttgatagtcccatactttcaaaagccttgtctggcatacaacggaagataagattttgaaaatctatcagtaaacttggaactttatattgtgcgccaatcaaaaccagcgaagccactttttcttcatgccgaatagcaaaatcaatcgcaagaagcgcacctaacgaaagaccgcagatacgaagcggctcttttacttctgaataccgctgttctaaatcgcccaaaatctgcgaatatgatatttcatcttctgctgaagaaaaaagttctgggcaatcgacatcggaaattgatagttgttggactacttctttccaatcctgtacagtttgtcccaacccatgtaaaagaaccgttttcattaaacacctcctaagttcaagataatcatcaacgcacacaagttgctcttgaaaagctgtcattgtgtttagaattttcaacaatccattcgtccaaaaacttcatctgttcttctgtatgaaaccagtgttctccatttctcatgacagaaagtgttgaatgggttctttgggcaaattcaaatatcgttccataagcggtaagattatctttttcaccatacaaaatgtgcgttgggattttccatataataggattttctcttacatagcaaagataatcccatgaaagggtctctccaaaggttgtctgaatttcttttttctctttgagttcatcttctgtaacatttgcccaaatcatcatatcagcaataagcctttccatatctacaatgggcgaaataaaatatgctttctctatttgctgatttgataaggcattgatagcaaaatacgctccaatgctattggcgattatttcaacagtcttgtagtttctataaatcgaattaaaaagtaatggaaattcttcttttgcttcccatggaaactgtgcagtatagtcaagaccaattacatcacaatcactaaagagcgacttgtaatggagagcttcttcagcatctcctccttttccatgtatataaataactgctttatccacgatagtaatcctccataatttctatgtttatccatcattcattataatttcctcaaccttaaaagtatagtgggcttttgtaaaaaataaaagaaaccgcctttccatcggacagtttctctcactatgtcatcctgacacgataaatttactggtcaaaatccgggtacagctccagctgagagaagtcctcatcggtcatcgcacagagcttcgtaagggcactgtcggtcagctccctcagttccgtttcctccggcgaaagctcgccgtgcatttcacgcaggctgtcgatcagcccggtgcggctgccggtattgtaaatgcacatcaggttcatttcctcaaaagtaaaatttcccatatcaaatctccctttccgcactctttttgggtgctgtctttttgtgttctgccttgggctggcttttcagctggtccacaacggatttcttcttttcccgttcctcccgatgaacggcgtcagccaagtccatgagggagataggctgaccgcttcgggcctgctgttccagctctgccaccgtaggctcttttgcaccattgttgatgataccgtcgatcatgccgtaatcgtcctccagcatcatttccgcatttttcagcgggttttctggcaggaatccggggatctgggtaaaaccaacactgtcacagtaatgacaggataccttaccgtcctgtctgatcgcaacgatgtcgctgacgctcatggagggactgtgaaagtccacgggcttttccagattgaattgctgatagagtttttccagctgctccggcacagtgccagactccctcagaggagctgtgtaaatgaggtcataattgctgcggtctatggaaatgttatgggactttaaccagtccagattcataaagcgcacattctgcggatcgtcacgacttacctgatagatggcaaagcaatctctgttctgggagagaaatgcctgttcgcgttcctgctgatgttcctgacgctccatgaccttttcgtggaactgagggcttttctcccattcctcatggtccacaccgaaaagaccgccatgatccatgatttcctgcgggtcaaacaccatactctccgtattgtcctcatgcagcacatagacggtcaaaccggcggcatccagttccagcgcccgttctctggtaacagggagcatcccatcataggagtagccatattcctgcatatccggtgtggatacctgctcatccggcatggggtattcatccagtgcctgctcctgcgcttccggcagctgggaagaggcagtcatctgactggtctctgcctgcatctgctgataggccgcttcctgcaaggtctcaaccatagacaagggagcgcgtctgagcgaagtgctgtccagatcgttatcatcacaaatctggagaactgccttcatgcaggaaagctccgacatatccagctgaccaccatccagctctttcatggacgcagcatcgtaaagagtgtagtcccatccgctgtcacaaggttggatatgaagataggtagtatcgttgatcagaaacaaagcctcctgccggttggcatccgcccccagtacctccatttccggcatggtcgcagccagttcctttaccgctttctgtaccagcggattgtcacggtaatagtcgattgcctgaatagtgtccaggtcaatggtctgcccggtcaaaatcggaaacggtccttcatagtcgcttccgtctttcagctcaaaaccaattcctttgatcccgttcattcgctctgccggaatttcctgatagatgcggaccgcctcctccaaagacaggttatcgtggtattctccgaggtttggaaactccatgcactctgccacatagtaagtcagattgccggttggctgctctatcggggcggtttccggctctgcctttgcatggagatcaatcccacgctctttgcatatttccttatagtggcgctcaatgtcagagatcaaagtgccggaggtcttattgatggtctccaaactggctctcagctctttcagttccttgccctgactccagcttgcaatatagccgaagctgttttctccggtctcaatgccaaaatatttgcagaccgcataggagatgctttcagcctccacttcctccgtgtggcggtctttcctctgttcttgcaaaaactgggtgagggtagaaaagccgccaacaaaattcagcccttcttcctcggtcaggatcaggcgtccatcttccgccagctccagcggctctgtcagcagaacggaacctgcatggtttacaaccacttgttcttctacacagaccggctctccggggtcgtagtcagaaccgcgcaggtcatagcaataaacgccctccggcagattatcacggacaatccgcccattggagaacagaccgggtttatcaaacagctcgatctcctgatattgctcgtcattggcaatctgaatctttttctgattgtggagcttgctgtgggcaatctcgtgtactgtggccgaaaccgtctgcacctcactcatgcccttacgaatggcaattttctgatgatcggcagaaaaatagccgtccgtatcggcggccattgcttcaaaagtaatcggcaccggtgcgctgcggcgcagggcctccatgaatgcctcataatttggcacattgccggaaagggaggaagcaagctccggcaaaggtttcccgtcggtctggcttacatcaaagaccttgaccgggcgaaacatgggaatttcgatttctttttcctctgtgacgatctttccgtctttatccagaatcggagccttggtatccgggtccagcttctgttcctcgattttcttcttatacggtgtgggggcgatgatggtaatgccatgctcgcccttttttacatgacgctcaaactggtctttccacttattgtatccggctaccaaagtggcgtccggcttctgcatatagatgagcatggtgttgtttaccgaatagcggtggaagcgggacataacggacagatagctcatatacttttcactctcaaacagttctttgatgccctgctcgatgccatctgtgatttcccttagccgctctcggttggtgggtttgttctcagccatgattttcaatctcctttccaagtgtgtgatttctgctgtgtgttctgcaatccatgccctttgttcttcttcactttcatacagaaaaaggtccagcaggtactctacataggcttttttctggattgcttccacaaaacgggggtgcggttcttcctccagtgtccggggagaattgtcggcctcccattttttcagcagatagtagtaatcggacagtacgcgataacaccgctgccggtcctcccgaaacttttgtgcctcggttttctgccggacatatctcctgcggggaggggcctgactgtcatagatcaggccaaagtcctgtgccagtttctccgccgcttcttttggggagaggtcaaagagctttgcggtaaagtcgatcacatccccatcttcaccgcagccaaagcagtggaaccgctggtctaccttcatgctggggttcttatcatcgtgaaagggacagcaggccatgccatttcgtttgacctcgaccccataaaacgctgccgcatctctggtgctgaccgactgcttgactgcttcaaatacattctctgtcatgtgcctttaactgccggactttcgcataggaggctggtatccggcggctttcgcacgctcactggcggctttgcggcgttctgcgctatatggctcccggactgatacacaccgctttgggacggtaaagttatgggcgtcctttcgggtgatctggtcggggtgcttttttgccagcagttccagcttctccatcagacggggatcgtgggtgtagacctcagccattggttctgcctggttataaaggagaatggtttcccgttccactaaagagagcttcatcggctgcctcctttccgctgatcaaattccagcttaaagttggcgtactgtccatcgtcctccaaaaccacagcggcatcgtaggtcttgccagttttctcagaatataggcccgttacacggacacggccatctttcagcagtgcagacaccacagccttggtcggctgttttttcttggcagcccaccatttgttatttttccagattgcaaatttgcaagaatcattctgacagaagaagcctttttgcagttctgcaacttcaccgccgcagcgagggcatttgcctaccacatcacggggcggggagaacaggtactcggttcccttgatgacctgataagttcccaccagatctttcagcatggtgctgatcccggccagaaactcctccggggcaagctgcccgcgctcgatctctcccaggcggtactcccactcggcagtcagaagcggcgattgcagctgttccggcaagactgttatcagggagactgcatcgtgggaagggagaagctgcaccgttttcctgttcttttttcgttccagaaaaccggcagataccagcttttccaaaataccggcacgggtggccggtgtccccagaccttttcgctcagcgtcctccggcatatcttcttttccggcagtctccattgcggacaacaaggtatcctccgtaaagtgctggggtggactgcttttgccttctttgacgattgcagcagcaaccgaaagggtctgtccttcagtcagctccggcagggctttctctgcaccatcttttttcggctctgcatctttcattttggcacggtaagcgtcctccagagctttccatccggggtgcttcactgtttttcctttggcggtaaactccccaccggcacacgctgcaatcacaacagtttccgaatagatatggggctgggctacggcgcacagcagacgcagggccaccagctccagcaccgctttttctcccgcaggaagggcagaaaggtctgcatccttgagatttctggtagggattactgcgtggtggtcagttactttcttatcgttgatgaccacatgggggtcacaggtaatggcgatccctttgcgaaacggcatagcattggcaaccagattgaccagcaccggcaggctgtctgccatatcaccggtcagatagcggctgtcagtacggggataggtgcagagcttcttttcatacaggctttgcagatagtccagggtctgctgggctgtaaatccaagcaggcggttggcatctctttgcagagtagtcaggtcatagagggcaggcggcttttcggacttttccttgcactccacctttttgattgtggcagctgcaccctgacaggcttctttcagctgctcggcagcagccttatccgccatgcgctccccggatacggtaagaccgggcagctccagcgccacggtataaaagggaactggcttaaaggtgtcgatctcagcttctcgctggacaatgagcgccagggttggggacatcacgcgcccgatgttgagggtgcggtggtacagcacggaaaacagccttgtggcattgatccccaccagccagtcggccttagcgcggcaaagagcagcatcccgaagcccgtcatagtccgcaccggggcgcaggtttgcaaagccttcccttatggcggagtcctccatcgaagaaatccagaggcgtttcatgggcttttggcagcctgccagctcgtagacgctgcggaagatcagctcgccctcgcgtccggcatcgcaggcatttactacctccgtcacatccggggcgttcatcagctttttgagaatatcaaactgctttttcttatcctttcccaccaccatctgccaatgctccggcagaataggcaggtcatcatatcgccacttggcgtacttggggtcatagctgtctgcgtccgcaagaccggccagatggcccacacaccagctgacacgccagccgttgccctccagatacccgtccttacgggcagttgcaccgatcaccgccgccaaactctgggcaactgatggtttttcagcaatcaccagcttcatattcttcaacctcccattcttcccgcacaggcgtgtgcagttttttctctatgctgttttcctcatccagtagcaggttataaccaaacctgtagtcatagcggtacagtttccccagcaggtcattgatgatgatacggcaagccaaaatgacacgggttttatccacctgcatcagctggtagcgttgataattgctgtaatattcttcgtgacggcgggtattgcaggcggcatcttcaagtaaactatctactgcatcctgacaaccatcttctttttccccttccatgcagttcagaagttccatcatcaaaggaaagctctgttcatccataggagcttctgctgcaagaaaaccgatcaaagcggataagagcagacgagccgccgtctgttcttgttccgtcagcacggccattgttttctccgcatttggcaggatcttttcttccacaaaatctgccgcatcgtcggaacaaagctgacggatagaatctatggacaatgaaactgtcacggtatctaaggagaaatcaaaggggtcatcttgctttggctttctccgaagtttgtttaacatggtagaaagaatgtcgccgccaaaatacacggcgatcaccagcaggtcaaaaacagcaatcagcttgataactataatcagaacactcatttttttcgtttcctttctttgagccagcgttccatctcacgatggcagatacctacgcaggggcttccataactcccgcaaccatagcaggggtggttgtggggtaaagaaggaggacgggaagtttccctcccgccctccggcctgcgtgtcatcatgcgttcatagggactgtctgtgaaacgggtcatttcacgctgtcctcgtcatcttcttctgtgctgcccccatcagcgtccggttcgtccgactcctcatcctcggtttcccattcctcggaatcttcctcgccataatcataatcgtccagactgtcattgcccttggtcttaggcttgttcttaacaagcttcaaataggcaaatacgccaccgcctccaagcagagccagcaaaaggactattgcagccgggttcagtccggcaggcttctctttttccggctccggtgtttctgccggaggttccggtgctttgcccgtacatttactcttatcagttgcacagaccggacaagccgtattgactgcccctgcttcacattttgtcgtgcagctacacacagcagccggcttctctttgacattttcatcttccatcagtgccatcaaatccgcttcatccacctggttcagaaaatgaacagcagtctttttatcctcattcgccctgtcgatcaaaatgtaaaaataattgccagccttggtggtaacagtaatgagctgcttattacctccaaaatcatccaccagtgccgcattcccctccggtgtaagtgccggtgctggttctgtttcttccacaatcacattgctatcattggtagaatcctctgccggtgccgccggagcctgttctgacccctgtgcaaaagcagggatcgtaaagccaaatgccacaaccattgtcaggcaaaaggcggaaagtgttcggagcaatcgtttattcctcatagctgttttcctcctgttcgttattttcatcagccaaactgccgggaactgtgccaccggacagcatggcgctcaactgggtcggggtcatacgcagggcgcgcaccatctggacgatctccagattttctgcctcggttttctgtgcttccagcgccttgagcttttcctgatactctgcgatcttctcgcggacctttgtaatctcctggtcaatgcgctcaattttgttctttgccatcgtctatcactccttcttaaaaatctctgttaccagttcatcaggccgtagcccttaatgctttgataattcaggtcataacttttgatcttgcaggcatcgccggaatttccctccacggtataaacacggctgccatccgtaccgatcacgatacccacatggtctgctgtcccatccaaatcccagtcaaagaaaattgcatctccgggagccagattgttatagcctcttgcgccccactgtccatgagactggaaccacggaacgccctgccactcacagcctgcaaagcgcggttcactttttcctgcctggttatagcaccaggatacgaagcaggcgcaccattccacgcggctgtcaaagccataccagctccaataaggatagccgcccacattgcccacctgacgcttggccagttccaccagctgaggattgccggggcgggtaccgttaatgaactgcacaccggacagatcttccgagccgctggtatcaggggagccgctggtatcaggggagccgccgccaaacaacagcggcttattgcccatggtctgccggtagacctgatacattttcatctgctccggggtcagaagttccgacaccacagcggaaatgggcttgctggcgagtttcacattcaaaatgtaatactcatagggaacttcttctgaggtggtctcaccggtctccgggtcggtggaggtctccgtgcggtagcgaatctccacttcctcagtaagcgtcagctgatactgtgctgcaaacacacgcgccagctctgcctgagcgctctgccgggtgtagccttgcaagacggcagagagaaatgctgccagctcatgagggtcatggccgatcataccaaggtcatagcgatactcgtcataccctgggtgactgctttcaatgttgtcgatttcctcctgcaactgggcttctctggctgcataatctgcctccaccgccagcatttccgggtcatccgacggataggtggtgccggagagaacggaaccgatgctctgcgccatcatggagcaggaggacatggtattcatcagcatacaggtaatgaggaacaaaacccctgccatcaggaaacccttcttgtggcgcatgacgaatgcccctgcctgctgtgccttttcttttaccgtccttgcggcttttcctgttttagatgcagcctgggcggtatttccagcagtctgaccggcgtgtttagcggcggcatactgctttttgatggcctgcttttgctgccagcgggaaagtggattgctggcaaactggggattttcctgcaaagatttctggtacagaacatttacatttgccttttccagttggcgctctgcctgtgctgctttgcggtacggcttcagcttgtggctgtgatagccctcccgcaccagataagcgccggtctccaccgcttcctcggacttgtgggcgctttccacgcccacattgtcctgctctgtttcccggatctctttgtggagcttgcctgcgaccagatggacgggagcttccctgactccttgagaaactttggaaggtggctttttcttgtcctcaaaggtcagcttcgaggtcttttttccggtatccgggtcaatgaccgtctgcctgacctttttctttgggatattggcctgcgccttatctgctctggccgcagctttctccgctttacggatcggcttttccagtgcaggatcagaccgttcctcatcagtaaagcgcaggcgcggctctttattcaaaccattctcccagcatgagggaggacatcatgtagtgcagctctgcataaatggccattcccacaggatcgttgaacatacagccggacaggtaggcataaaactgtgccaccacatcggacaggatcttcgcttcagttccttccagaaccagaccacccataccttccttggcacggatggcactccagacctctgccagacggagaagccccacctgaccggtctcattcagttctgctgcctgatctgccgctgtgcggcactcgctgactgcttcagccatgaccgtaagcagctggctgcgctgggcatttaccgccctgtcaaaaaacatcaacgggttttcattcaaaatgttgagattcataatcattcatcctcctttttcaattcttgaggtttggtggtcataatgcggtaaagctcggtgttcttcgggaagtgatccacgaaaggcaggatcgtggagccataaaacagcaggccctcgccctcaccggagtgggtcacatagctaagctggtgtgtggaaatgcccagctgcttggcgaggatctgccggtccccgccagcctggttgagcatatacacgaagtcggagttttcaaagatgttctctacctcgcggctgctcaaaaggtctttgacattctgggtgatacctgtcggaataccgccccattttctgaatcgcttccagatttccaccgtataggcggcggtctgttcctccttcaaaagcaggtgcatctcgtcgatgtagtaacgggtggacttgtgggcggcacggttgatggtgacacggttccatacctgatcctgaaccaccagcataccgatttttttaagctgcttgcccagttccttgatgtcatagcagacaatccggttatcaatgtccacattgctctgatgattgaacacattcaaagaacccgttacatagatttccaatgccgttgcaatgtactgagcttctttttcttcctgctcccgcaacaggttataaaggtcctccaaaatcggcatattctccggctttgggtcattgagatattcgttgtaaaccaaccgtacacaacggtcaataatggttttctgcaccggctgcaagccctccttaccgcccacgatcagctcacacaagctgaggataaagtcagacttgagtgacagcgggctttcatcatccgaatagtccagattcagatccatcggattgatatagttggttgaagtaggtgagatcttgatgacctgcccatgcagacgctcaacaagaggtgcgtactccgcttccgggtcacagataatgacatcatcactggtaagcaaaaagcagttggcgatttctcgttttgcgctgaaggacttaccggaacctggcgtacccagaatcaggccgttggggtttttcagcagctttctgtctaccatgatgaggttgttggacagggcgtttatgccgtagtacagagcttctttgccgttctggaataattcctgtgtggtgaacggtacaaagatagccgtagaactggtggtcagtcctcgctggatctcaatctgattgagtcccaggggcagacagctcatcagcccttcttcttgctggaagtccagcctggtcagctgacagttatacttctgggcaatggagcctgcctgaaagatgttgttgccaagctgacggggattgtccgctgtgttcagcaccagaaaggtcaaaaggaacattctctcgttgcgactctgcaaatcctgcaagagttttttcgcttcactgccgtaggtagcaaggtcagatggaatgatgtccatgtcgtatccggcgcggactgcttttttctgttcctcgatcttactgcggtccaggtcggtaatctttcgctttaccgttttgatggctttcacctgatccaccgactgaatgtgcatactcacaatgagcgaactttccatatccagaaaatcagccagcaaacggtcattcagttccggtgcgaggatctgcaaaaaagaaacagctccgtatttcttacccatacggaactgcttgccggtgcggaactcaaaggagcttggtgcaataaaatcctttgtggacagaccggaaggagccagccagtcccattcaaactgaaacgggaattgttcatccatgtggaataccgcatgaagctgaaaaagcctttctttaccgtccagcgttctggcagctacaccaagacgcttgaagttattaagtatatcggtctcaatacgctccagacggggcttggcagctttgatgctgtccgcgtcgataccaaaggtcaggtatttggtcttgatgaggccgttgttacctctggccagctgattttgcagcattgtggtgtattcctcgcggatactgtcaaaggcgtccctctggggcggaatggaaatggagttagcaaaggtctcctccgatgccgcaaggttcaaaaaagacagctgaaaatgaatcgagctgtcaaaataattgaggaaatcacaccaaccctcaaagattgccgtcttatcttcgttttgggaaagctgatagttgatgtcctgaaactgaatggtctttgtgtagtggctgtccgatatgcggcagattccgtccggccacatccgttcataagggatactgtcctgcgcagattttccttttttgtccgtacggttagcgcgggcaatggccgcttcgatctgcttcttatcggcgcgggacagctttttctttgtctttaccggctgcacagttttttcctcggtttttccgaacatccgatgcagccatttttttattgcggtgaacaatgtcatacacctccttatcgagcatttcctgccgctttaatacggcataaaagttattggtctggtagggacgctgcttgggacggatcacagctactttgagaatgttgcccacgatcttttccaggggctgcccatgcttttcgtacatagccagcataaagaagggcagcataaccagcatcatacacatagccgctacactgtttccggtaggttttctgagcaaaaagaaaagcggtacgccaataagcgctccgcccgtgaagcagataagctgccgcttggtcagattgaacatgacctttgttttgacttttgttaagtccttgggtacgggtacataagccaatgtggaaacctccttccgttttagtgtgcctgaaagactgatttggcgagactgccggttttgaacagcgtaaaacatagcagtacggtgtagcccacgcagctccagattgccatgatgatgtcatcttccagagcgatgttctgcaccagcacagcataaattgccacgcagacgataatgagaaacgcctgaaagcccagtgccagcagagatcggaggtaattctgtcccataccgccccattctttgcccatcattgctgccattggaacaggagccaccgaagttacaaggtagatctcgatcatacggccataaataacgataaagatacagatatacaacgcccacatggtaatgccaataaagagggattggaaccacagtccgaacagcggtcccaaatccatttccatcagcctcggttccagatcggtcataactgaggaaatgtcaatggacgcatccgaattgataatccctgccgcctgcgccaccacgctctgcgccatatcaaagacgcccatcacgatattccatgtgtttgtgacaatgaggatggcggcagctgatttgaacacccacttgaaaatcatccaggtatccacatcatgcaggttgttcttgtctgcaatcatctggatcaggtctacggtcatcacgatagccagaatcacacctgcaatcggcaccatgatggagttggacagattctcaatcatgctgaaaatactgccattccatccctgtggggtctggcctacctgtacggatatatccgcgacctgctgatttacactgtcaaacatccccgaaaggttgctcataataccgcccaccagcatttctttcagccaatttgtcagggcttcaagtaagaaatccatacggtgtcaacctcctttccgccgcccccgcaaagctgcgggagcggcaaggatttcatacggagacgcttagacagagaaaagcccggagagcagaggtacaaggaccatgccgactacggctacaccagcaccggccatgagctgcttcatgccctggctcttggcgccggggttgtcgttgccgtaaccttccagcaggttgatgacaccccagataccaagaccagcgcccagagcgataacgagggtctgaagaacggtgattgcctgttcaaaaaatgccatatagtttgttagccggaatctgattaaaaaataggtttgtcatgtttcataggcatacaaaagccggaacaatctgccgcccggtttccggggggcatgattccggctgtcctcctttttcattattttttcttgcgattgtccgctttgtacgccaatggcccatagagggcaggtgcggcgaatagataagatcactcccttctaaagcggaacgaaattaagcgccctttgtgtctacttcatatacatcgcagacctcattgggcttgagtttcagccttgcggacaagaatgcttcaatatcaaaagcgttcttgtcatccgcgtcggcagtgtacttgaaattggggtgcttggtaatgtcgtacttgtccgaaagaaaaggacgcacaccgcgcagctggagaatacacttgccgccatccataacagcaagctcatcctggctcatcagctctttccccaacttttgatagttgagagagtgggaagtttcacgcccacggctctctccggtgttgtaggtgtcgatggtttcctttcccagcacggcagccagctccttgagggtggttggctccttaccgcccaggaagatggaagtatccatgttgccgatgatggtatctgcgttatccttatagatcgccttcagctgactctgtgcctgcaacaccagacaggcggaaatctcacggcttcggatggtggccaccagcttttccagcttagggatctggccgatattggcgcactcgtcaatgagacagcgcacatggaccgggagcctgccgccatacacatcgtcggctttttcgcagagcagattaaacagctgggtgtagcacatagagatcaggaagttaaagctgtcatctgtatcactcataatgaggaacagggcagttttctggtctcccagagtgtccagctccagctcatcataggctgtgacctcacgcagctctgcaatgtcgaataccgcaaggcgcgcaccacaggaaatcaggatcgacttggctgtttttcctgccgccagcttatatttcttatactggcgcaccgcaaagtggtttggcttttctgcttccaatgcgtcaaacatcagatccacgggatttttgaactcctcgtcatcctcccggacctccatggcgttgatgaactcaataagggtggagaagttctgctcctccaccggagcctcatagtggatatagccaatgagcgcacaatagagaagcgtttctgccttgacccagaaatcgtctccggccttgccttcgcctttggtattggcgatcagcgtcgtgaccagcttcaatatgtccttttcgctatggatataggcgaaagggttatagtgcatggatttcttgaagttgatggtattgaggaccttgatccggtaaggctcataaatgaccttgccgtgcttatccttcatgggctttccgtcctttcccagtttgggtgcgcccctttggagcattttcccgcactccaccaaaatggttccctttgggtctgtgaccacataagaactgtgcatctgcatcagatttggtttgagccagaagcgggtcttaccggaaccggagccgccgatcaccagcacatttttgtttctggcggtctttgggtccttggggcggctgttcatggtcaggctttcggtttttgtgagaatgacattgttctggaacaccgggtcgatgtagggagcaatatcctcacgggttccccaacgggcagaaccatactccatgccgtgacggtacttcttggcgtttttacttttgagatacaccgccagacgcaggccagcaccgcagcacagccccaccagcagatccagcgggtgcaggctgggccagaagctttgcagcgccccaggcaggacagcaaacagagaaaggaatttctctgaagcatttgccccctgagccagtcgccatgcctccccgaagttggtagtaaacagccccatcaggagatagggcaggttcagcaaaacgagctttttgatgtcaaactgctttttcatcgttccagctcctttcgcttggtgcggtccaccacggcatttttgaccatctctttgaactgactgagttttgccagcacagacgggcgttctgttttctcggccttcttgacctttttgctggtgtactcggtaaatgcagcggtcagcgcatcggcgtcacggcctttgaaaaagatcaggtacttgggtggggagctactgcggtctttcttcaccgcatagtccacaccatatttccgggcgatcttctcaaattccttgatggaagggtctgtgatctcgatattggagatcccctgattctgaccaatgagctgcttgacggtctgttttccgtggggtgtcacaggagcgtcacggcttctttgcttttgcagcttcttttccttgcggtgggccatgtacttgctgatggcggctttgagcagcctgccggtgaactttgttccactgacaaccagcgttaaagttctgttttccacttcttcctgcattttcatcgcctcctattacaataaatttggacaggaaagccgggcagccagtccggctttctttccatctcgtgcctaagctacaataagaggagcaactggctgacccttgcctccttgggcttttatgtccgttggaaagactgttagccatcctcttgttgcagcgttcgatttgagcaggttgagccaccggatgccggagagttcgtgtcacccaatagattgaatcggcagcgagaaaagatggatttccggttgcagattctttgtgttggaggaatgtgaatgaactgcgttggcatcgatgtttccaaaggtaagagcatgattgcagtcatgcggcccttcggagaggtagtggtttcaccctttgaagtgcgccacaccgccagcgaactgagcgagctggcaaggctgctcaaaaacctggacggtgagacccgcgtggtgatggaatccacgggcaattaccatgcgccggtggcctggctgctccacggcgcggggttttatgtctccgtagtcaatgcaatgctggtgcacgactacgggaacaacagtttaagacggggcaagaccgacaagaaggatgccgtgaagctggccaactacggccttgaccactggctcacacttccgagatatgttccggaagaggacacccggctcatgctgaagacctgctaccggcagtaccagcagtattccaaagtacagaccatgctgaaaaacaacctgatctccctgctggacaccgctttcccagacgcaaaccgcctgtttaccagtccgccccgcgccgatggcagtgagaagtgggtggactttgtcgccactttttggcattgcgagtgtgtctgtggtctgtctaagaaagcctttaccgccaagtaccagaagtggtgcagaaagcacggctacaatttcagccaagataaggcgttggatatttatgcctctgcctgtggacgcttcggtgtcatgccgaaaacaaatacggcaaaacttttggtagaacaggccatttcccaactccagacaacttccgccgcattagctgctctcaagcaggagatgcagtctctggcaacttctctgccggagtatcctgtagtgatggaaatgtttggtgttggccctacactcggcccccaactcatagctgaaattggcgatgtgcgccgttttcattccaagaaagcgctggtggcctttgcaggcattgacgccccgccctaccaatctggccaaatagatgtccgcagccgcagcatttccaagaggggatctgcctcactgcgcaggacacttttcctggtgatgggcgtcctcctgcaatgtgccccaatggatgagccggtctaccagttcatgaacaagaaacgctctgagggcaagccataccgtgtctacatgatggcatccgccaacaagttcttgcgtatctactacgcttctgtgaaagcctatttggattccctggaacacgactgatttccctgcgctataccatctggctggccgccgtttcgattttgagttgctcagcggcttgattttgtgttgcctttttcgctgctcccaaaacctgaaatttctacttgacttttgttagcaggtctttccacaaaatgtgcaggggtggtgcattttcttctaaggcgggaccaccagccgccggagaaaatatttcttcatcgctccatcccgcggctctttttctttaccggcttcttatccggcaaattccactcttcccgaaactctgccacacctttgggatcaaataccttcaacttctccagatcaaaggcaacggcagaatattttccataaccggactgcacctgatagggaagcaccttccccaatttgttctctttgatgaatcgcagcaggtccttgctgatgtcaccggaaataaacgcctctccggggtccagggaatatcccggtaggttcaccgtcatatctgcaaacggttctgctccatcttctgtatgggtaatcatgccgatataaagccgctgattattcgcatacatcccaagttgcagcgatatggtttcttccccatattcccacttgaaggggactttcttttcctcattcatatcagattcctcctatcgtatctgttctttgtggtcataaaacaaatctccatttctgacctttgcatggctgagaatcttgatctgcccctttgcctgactgtccagagctttttcatagcctatatctgacaaaaacaggcgggttcgttctcctttccagcccaccggggagtcattcgtcagcacatcaaaaataatcatgtgccgggtgttctccgcaaatcgctgaagatccatgtagtcatggccgtgatagttctgcgccccggctttctgacgcatttcctccatcagctgaccgattgtttttccttcctgcataaaacccacttcctttctgttcttataagaccagcaagatcatctcccgcagctgagcaaaatagagcttgccctggggcgtgaccagcgtgtaggaaccggtatgaccgtggttgcagtagtctttgacgcaaaacagccctgcatttttcacattggcataaggcagcacattgccggatgccgtgcggtacacaaaccgccgttctatcagaaaccgaacaaaccggcgctccgggacatccaactctttggcggtagtcctgagattggtgctgtgctttaagtcgatgaacaggtcatagaaagcggctttgccctccagctgtgcattttccttacgcagagaaatattcgcttcacgctcagccaacaagtctgagcagagcttcatcagagcctccggggaagtggcaacctcccacagcttctcttttgtgagataggccccgtgcttacgaatagtaggcaagacctcatcgaatacccactgttcaaaccgctctgccgatggcaatttgctgtgaacgattaggcggtacaaatcgccttctgggataaaagtcatactgattttgcggtcgaggctttgtgggtgaggtgcgtcgcgtttcacgacatacctacaatggcggataattgcatcgcggggattactgtaccccagcgcagcagccacatccgttccgctgaacaagtatttgccgttttcctcaatgacacggatactgccaaactccgggtttttgaaaatttccatctggttcatgtcgtgcctcctttggcatgataaaaggcggcctttaccagccgcctgcgtgcatatcgtgattgaccagtgaagtgtagtggttattcatggtggtaggcgcattgaacagcaccgcaagcaggtactgcttcatgttgcgtacctgggtggtattcttttgcagacagtccatgacaaactcgatgtgggagctgtccagtttcaaaaaacgggaacgcacgatctcgtgagggaagtctgccccagagatccgggtggtctttcgtttggcacagaccgtttcgaccaacagctctacgatctcattcaggtcatccaggtagagaggataacgctgcttcaagcagtcatactcgatattctccaaaatcaactcccgataattttctatctctgtgacagacatcgcatcccttcctttccgttccggcggtctttccgccgctgtttcccggaagggaatggaatcggtacttgatccataagtaattgatttttctgtatttgatttctctatatttaattctgcgggcttttccgtatccggttttaccatatccgggttttccgtatctggtgaagccgtatccggctgggacatatctggctggggctgttcatagatgacatactcggtatctgtgatccgcccacttttatcgcgtctctgatggcgcacgatatatccggctccttccagttcacgcagggcagcaccgatggcatccacgccctccttacagatctttgcaaggccacgggtggtgtagttccagtcctctggcaaagacagcatcatggaaagcagccccttggcttttaacgacaggtttgcatttcgtaaatgatgattgctcatcacggtataatcacgggtccgttcaatgcgaaaaacggccatcgacctcactccttccgaattttgggtacaaaaaaaccgcaatcctcatttcaaaaaattgcggtgtttagcgcttttcaaattttcttgcatagaaccaaaacagcggcttttggggacgcacctctgtaaatggctcatcctgggcgaaaggaagtgtttgcatcacgcggtcaatatccgttgaatccatgtcatgctgagatctgcaatcttcccggattgcttcttgaatttcctttacagtacacatttcaatcctttcctttcgcagtaatgatttgtttatgagtggcggcggtgttttcccggtttgaaatcgaggatatgtccctcaatcacacgagcgtaacgcttgatcttgatctcccgacgctgctggctttgcagggcggcctgatacccgtcctcagtcaaaaacagtcgtatttcctctccggggctaccgtaagctgtgctgggacgcaggacggaaaactcgatcatccagcgggtgttatcccaaaacctctctacggcgagaatgttgtgtcctttcagctcacgggctgaaatatccctcataggcggctcctttcatcgttcctggtctctctgacgctttttctgccatgcctccagcagcttgatgatggtttcctgcatccgctggggcgtatagcttttggggaaatacttccgcaaagtgtcagaggtaaatgttactcggtccagatcacttttcttttcctcacccatgatgacacgcatcatatcgagggtcagatgcccctcctgactgtatttcttgagccgctgggcttgggaaagggaaggggtagcctgctcactgtccatggcatccagcaggtctacctgttcgtcctttttgagaaaggacagttcataggcagggttcagggcaatcttcttttcatccaccatatccatcaattcaggaatcagctctgtcagacggatatagcgaaaaatctggtttttactctgacctacttgctctgccaaaacctcgctggacttcttcccaaaatcgttcccaacttgggaacaattttctttactcggtctgccagcctgtcttttcatggcctccagcttcattttgtaggcaaaggccctttcgcttgggagcaggctttctcgctgcaagttgctgtcaaccataatgattgtagcggcatcatcgtccaaatcccgaacaatgaccggcatggtctccttttctgccagttcactggctctgtgccgcctgtgtccggctaccagctcataaccgccctccgggtccggtcgggcaatcgcaggaaccaacacaccgtactgcttgatactgtctgcggtttccatcatggcttcgtcatccttgactttgaatgggtggttcttaaagggatgcagttcagacagcggaatctcctgaatcttttccagctttgcatcctgacggccttcttcggtggagaacagatcatctaccgaggccagctctatttttttcgcgctgcttttcaagtttcaacacctccttcgtcagatttcgatacccctctgccaccttgccaccgggatcatgggcaaaaatgctttttccctcggcgctgatttcctttgcccggacagaatgggggatctctgtgccgaatactttgatcttgctgccatagttctcccgcaggagcgctgagatctctttggcaaagttggttcggctgtccaccatcgtcagcaggataccgtctatctggagcttggggttgatctgccgctttaccttgtttaccgtggagagcagctgttccaggcccttggcgggcagatactccgcctgaacggggattatgaccctgttggcggcggccagggcgttgactgtgagcataccaagggagggctggcagtcaatcaggatatgggaatactgtcccttgagcgtgtccagatactgccgcaagatagtctcacgactcatggcatttaccaaggatacttccataccggaaagttgaatgtcggcgggcatcaggtcaacgccttctgcatgatgcaggataccttctccggggcgtataggctgatccatcagaattttgcccattgcatccgacagtgtaaatggcagcttgtccggttgcggatttcccaagctaatcgtcagactcccttgcggatctccgtcgatcagcaggactttcttcccagcctgtgccagccctattcccaagttggcacaggttgttgtcttgccaacaccgcctttctggttggcgatggcgatgatttgtgtattcattgacttcacctcatttctaattattgctgttgcttctggaaatagaaaaagccgccacttcaaaattaacagtgaagtgacggctctttctatcgccggaatacgagttcctgaaatgaaaaaagcacccagcatttatactgtgtgctacatcaaattcatattcaattattcaaattaggtcaaactatgtcaaactgccacagaccaaaacgagggaacaaagggctgaaaagcgaccccaaaacacccccaaaaatcggctctcggttaaccactttgggcaccacttgaccctctttttgccctctttttggccggttaaccacttgcggaccactaaaaattgggtgaaaacggttctcgtttttccaaatttggtcaaactatatcagcccgtttagatatagtaaaaccccggaaaaccttgattttccggggtttttgaaccattttgatacggtctgaacagcagattatctcttgctgaactgaggtgcacgacgagctgctttgagaccgtatttcttacgctctttcatacgtgggtcacgagtcaggtaacctgctgacttgagaaccggtctgtaatctgcgtctgcctcaaggagtgctctagcgattccgtgacggatagctccagcctgtcctgtgtatccaccaccacatacattaacgattacatcgaacttgtcagctgtctctgtagccacgagcggctggcgaacaacaactttcagagtttcaagtccaagatactcgtcgatatctcttttattgattgtgatctttcctgttccaggtacaagatatactcttgcaatagatttttttcttcttcctgttccgtaatattttgcgttagccactgttatttcctccttctacctaaaatgtaagaacttccggcttctgagcctgatttgcatgctctggtccagcgtatacatgaagcttcttgatcatgtctcttcccataggtcctttcggaagcattcccttaacagcaagctcgatcaccttctctggcttcttagcaagaagctcagcaagtgtagtctctttcattcctccaacatagtcagagtgattgtagtagatcttctgctgtaatttctttcctgttactttaactttctctgcattaacaacgattacataatctcctgtatcgatgtgcggagtatattccggtttgttctttcctctgagtacctttgcgatctcagatgcaagacgtccaagtgtagcgccttcagcgtcaaccacataccattttctttcaatcttatcagggttagccatataagttttcatgggtgttcctcctataaataatcattatatactattgcttatttatttgaaatcagcatactccggggctttggtgcatactgtttctccttatgtcataccttgctattatatgttgatttgtgttccgtgtcaagtgttttttacataaaatcgcattttttctttcagttctcaacagcaaagcaaaactttttcattcttttacaaaatcatctctatttcgcacttaaaaagtgccgagtcatatggatttttcctataactcagcacttttttcacattccctactcaacggttattgctccctggaacaatcaaaacctttgatttccttatttttcttcttttgcctgctctaattctttaagaatctgagctgtaagaccttttctatctgttttgaagtggaagtaaggtctttcagtaatttctctgatctctaccggatattcatgttcttccagtgtatctttcaacagttctgctacttcctcaagtgtctttgttccatcaagaatcacaaacagatatggacgataatatccttcatgctcctgatccggaacgagacagaagaatccatctttcactccaggtgttcttactgtttttgtctccattctcattacatgaagtggcttatctccgtaagctttgatttcaccacgaccaagaatatgcacaattccctgctctgtgatataagcctcgtctcctgtatgtaaccatgtgtttccatccggatgctcaacaagtgtctgctctgtcagttcttcacctctccagcctgagtaatgaagcatcatagacggacctgtcatacagagttctcctgattctccgtaatttaattcattcagatctttgtcaaatacaccaagtacagttgctgtcattggcatacctacacatccatcctccaatgggaacattgggttcggcagtgtgaggtttgagcacccctcgctctgtccataacctgcacttaattttgcctgaacgttgtgtttatggaagaattcttctacctctgcatacttacggtcattcatagcttcggcacctgcaccgattgttctcaggtgagacatatcgtaatcttccggaattctctcactggacattaacatctcgcaatagagtgggatcaatgcccagaagttcggtttacgatccatgaattcaatgtcaatattctctaacggacagaatggatcaagtgataccattaatcctgtagaaagtgggaagatcgtcattgaaactgttactgcgatcaatgccggtggaagaattggtgtccaccagacttcctgcacatctgacggcggaataaagattgacatctggtatgcagttgctactatatttgctgaagaatggattacaagtttagagattcctgttgaaccacttgtgtatgctccaaacacagctctgtcaggatctaccggtgcaagatattcgcctttgaagtttcttcccagttccataaactcctgccagctcatatcgccttctgttgtctctgtctctgccgaatagcgggctgtgatttcttctaatacataatccttcatctggctcttgtctgcatattcaaatggtgacactttaatcatacgtgtcatcggagttgttgtacggaataactcttcatcttcttttgaaagataatccattacaaatgctgtatctgttttacatttacggattgcaaaacaaagttcttccggttcatcatcacgacagataattgctacaccgactctttctgctgcaagaagcagaataaaatgagctggcgtagatactaaaaaggacggaactctgtcaccttcgttaaatccgagggctttcagtgctcttgctgcaacatctacctcttcccataactgtttccatgtaatcttatttccataatactcaaatgtgatcttatcctcattcgggtttttcattttcaggaaagcttcaattgtaattcttggtatctcaagatttctgaactgttccggataaaagttcagccacggtttgtcaatacttgctttacctgtcaatttctgctctgtaaaattcatgattttattcccttcttttcttttgtttttcttgtcatttttccccaaaaatactttcaaattttatcacaggttctttcaaatgacaatttatggaaacttgaatcaacatgattcacatgaatcatcttgttttccaagcttcatttttgaaataaatacaaaatcgtaggtaaattatggttcttttattgcaattttattttctctgctctaaactaatatcatactatcaacttctttaaggtatttttaaaggaagggggacatattacaagttattctatgctctgtaatataacaaaaatatgaaagataaaaaccgtttcagcattttgctagaacaccttatgactattgctgagctaaaaaatagtattcttgcaaaagctgttcagtatgatgactcctatatcagtaaatggattagcggaaaactgttgccaactgaaaaaaatcatgaaaatacacttcaggctatcagtcactgtattgttgaagctctttcggaagaaagcactacacaactattacaggaatatcagctacaggatatcaaagatcttgaaactgctatttatgacaatctcgaatctgaatatatgtatgcaaaagaattacaaaactcaaccggtacagaagtagctccaaaaatttcttattatccggagcttacattagaccagttcatttttaaaatgaaacacccttcacttcgaaaagttaattctctaaacgtatacgcgattgttgatattttgaatgtcgatcctaattaccagcttttgattgcagaactcaacagtgcacacggcggccggaatcttattctacctggtgtacatttttcacttcttatggacctggaatcggctgcttccactcctgcctataccgctggtttcttaatgaatgtgatgaccaatctctctaatattgattttaatctttattctggttcgcaggctcaacgtaagctcatttttgcaatcagagacacttatgctatctctggaatgttagtagatagcagtcactgtcttggaattaccacaattgaagacagtgatctaacgaatgaactttatcacaagatcagacttctttgtaataaagaaacactattaatccggaaaacaaccattccggaaatgattcaccgctttgaatatgaacaaacgttaatttcacagaagcaatactgtctcatcggacacctgacagaacattttcttccggaagatctatatacggagctcctggatgagtattgcctgaataacaacgatcttcagaaggaggacgtaaaaaaactaaatcacctgacacagcgcattttggagaccacaccaatccatctgatcatttatgcttccgtgttaaaagatttcacagttacaggagaacttgatttcttcggtgtaagaatatcattaactatatcccaaagactgcgttgccttaagaatctggaacagctggtaaacaaacttgatcttatgcatgtatgcgttcttccggaagtgttagtgatttcatgagctgtcaccagattgctcacatcagttgacgctcacttgcttaactttctgtcaccagtcagttaggcaataccgcctgtttccaggcggtacctgctttatgaagttaccatcccaagcatctcgtgttccacaacgaacttgatcatataatcatcgatcaatcgtttctgattttgaaacgcatacatcaaagctttttcacagacacggttgatcatccgtgggattcctgcagatgccttatggatctcatccaatgccttggttgtaaatatttcctgcccgcatccggagtaatccatgtggcttgcgatatattgttctgtttcagaacggtcaagatgaggcagcgtacagtacatgtcaatgcgctgccggatggcggcataccgctgtagctttagtttattttcccacagttctgtctgcccaactaaaacaagcgccatgggactcatggaatcaaaccggtaattgagcaaaaagcggaattcttccagcgtctccttctctaacaggtgggcttcatccaggatgcagacaacttttttacgctgtacgccccggattacctcgatctcctgttgcagctgacgctttgaatcaccgcggtagaaacgggattccagccccaactgatccagcaaacctttatagaaccaccttggggtcagttttgagtctgacagataaaggatgatgtaatcctcttttggaagttccgaataaaaccggcggataagcgttgactttccacaccctgaatcagctgttacaacagcaaacatctggcggtccgccacataagccagacgaccgagagtttcccggaaagcattggattcaaacagtttttcgggagggacgtcccggacaaagggggtatgttccatgccaaagaatgattcatacattagccattcacctccttcctgtaggaagcaaatgaaatcgcatctgccatttggcgcctgctctgggtatgcttcgtttccaaagcatccagaaaacgggaagttgtcggtttttgttcctgcatagcagctgggagcgtagcgtgtctatcgcaatacgccccaatctttacaggcattgcctgaaaaggttcaaatccgggatgagaaatggtgatgatctcaggatttgccggatcataggagatttctaccgtatacccgatcaaggccggcttggtttcatacctttgcccgcggaaactgatacaggcacctttatccactttcctctgctcatgatgcaggaaagcttcggctacaacggctgtatccaaaaaagtcagtgggcggctgtcccggttccattcctgaagcggtgagatcccttcttccggaacggcagcgccaaggctttcatagtattctgcgatgccatcatgctttttcttgtggtaatactcatccagatagatggcccataggcggttcagttcctccagtgttttgatgtttttcagctttgattcccggataaaagcatctactacctgatggaacttctcgatcttccctttgcttttaccggatcttggttttgcatacatcacacggatgcccaaccttgcaagggaagaccggatctgttttgcgatatactgtgtcccattatcaaagtaacaggcatcgaaggttccataccgggaaaccgcctgatggaacgtatcttcaatgattgcttcttcctgattatcatagaaccgggaagataaaaggtatctggagtggtcatcgattgccgaggacaggtaagtctgtaccttggctccatttcttccaatcggaagcttgggaccatacttgatatccgcctggatcagcatcatgcggtgtggtttgcagaaacgtttggaagaactgttccttgcatcctggtacatctgcatctgcttttggccgtaaccggccttgtagatatggcgttccaaagtagaacgctttaaagcaccgggtgctgcaagcccttccgtttccaggatgtagatgatctgggcaaccgaccgctcgggaacctccttgcgtagctggattgcctgctccaacagaaactcaaagttttcagggagtttttgtgagcggtgtttctcccggtcagccggctttagccctgtaaactgcctttccgaaaacgctttttcataacggtaaagggaacggaccgatatatgattctcctctgcaatctttttgcgcagctggatccgttttgcatcatccagatcagcctggagaagcggagaaatcaattggaaacgcctgagggcttcttcttcctgccattgttgtttgtttattcttgtattcataaaatagtgacctccttttgagaccactatacccgttggtaccgcgacagacgatgcaaagtaggtgcataagccttaccagcagatcgggactaaaaatcccccgctgttgtaaatctgacgcaagatgatttctaaccagttttgatattggtttctgaaagaatcgagcagtgaaccaagggaaatcctctcttcgttataacccagcaggaactccctgatcgtccttaaatatccgttgatacgttcaagattttcgcagaaccattgcagccagcggagcatggtagcgcaggacgggtagtcttcagaatctaagtcttccggctgtacaacgccatccagcaccccggagatcacttctgtttcgtaatgcttgtacggaacaagacaatccggaagttcattatgataagagtggcagttcttacaataaaaccgccgaatgatcaactgatcttttaaaccgccttcctttctacggatgcgtgggcgtgaatcccggtaacgaagcgtagcctgacagatggggcacatatgggtggtcacactgctctcaacaaaaaacaccaaaatcctccttgaggacaagtgaataatctgatataataaccatggtttagtgaccagggtctcagagtacacaacttgctaggagggtgctctgagaccttttcctttttgtatgctgatgacagtatacaggtcaattcagagacaggcaagtaaatcagtattttgataatttatgaggtcaacaacacggaaggaattctttccgaccatcagcacatagcacacccgacactttttgtatcagattctttgtgttatctgcgtttaaagaagttgactccggaatataacatctgcattccaaataagattatattggatcatatcttcgaagagtttttcgatgatgtctgggattctaatattgataaaaacagccataatactgtagtagccatgattcagcatgcaattcatgcaatagaaatcatgcttgaagtcaactaaaaatgagtatcaataaacaatcccctacctgttgctatttcaaattaatctgcaactggcaggggattatttatttattcatatgttgtctgattcggatagttaaatgcaatataactctttccgcggttaattgatatttcatttcctgattcatcataaaatgttaatcttgataattcattattttcctctttactccaatgaatcttctgttttgcaccgttcgaaatgtaatatcccatggagtcttcccagccatcccagtcaactgctttatgtcccaaatcatctttgacagagatagtggtctctaacacaaacacattggtaaaagcaagctggtttcctgtctttccgtctatctgggcatttccatcaatttcttttttataagtattgcttgcttcatcatagacaagtgtagcagactgtgcgccaaaatcaatactcactttcttacacacatcttctgatggtttcacttgttcatttaatccattaaactgaaatgctgttcctttcttatcatccgcaaggtctgttctctttccagtattttgcactacttctgcaaactttgttccatcaaagtatcctgtgtgttccaatgcatacccctgattccgacgttccatatctcgtccaaacagacctcctgcattgtaaattccatcatactgatccaagttcaaagcttccagataatctgcgatactatcatcaattccccaatttacataaaacgcatcaaatccctgagacagtgccgggaaataatatctgcagcttcgtatcgcacagatctgcggaacagttgtataatccgcataaagagccataaaacgcgtctgatcaccctctaccgggatttcaaagataatatctgctttttctactccgtactgtggcattgctgccggaatattattcaccataaccgccaccggacgtttaccgatagcagcatctgtcagatccgcaagacctgtcagcaggttttgattttccggaatcttttcttcttccggttcttccggcacttcttttactggttctggcttttccacttctattttcttagtcggtggtttttctgtttttgtctcttttttcttagagcaacctgaaagagccagaactatcatagataaaatcagtaacaggcacattccccttctttttttctgcccgcctcgtttcttcttcatacactttccctcccttacatttggaatataacgaatattaactgaattaattatatcatcccccagtgtcttacacaatcaaagaggcacatattaagcaaaaagcacagtgaataaatcactgtgctttttgcttataatcttcacaagttgaatcctgtttataacttatgattcagatctcattcaattattttgcttttccatatacatacttcggtgttccaccaacaaccttatttccgttagagtctgtatggtatgggaatacccagtagaagttccaatctgtgctggatgccttcttatctgtaaatgttgtgccttttgttgtcataccgatgtaaccatatttctcgcctggatggattccgtatacaagatacccttctgctccggctgacttcgtccatgtaagttttactccaccctttacagatgaagctttcaggtctgtaacagctgcgcatttctgtgctttaccatatacatagtgtgctgtcagtcctggatacatcttgccattttcgtctttgcagtatgcaaatacccagtaatagttgtaatcacttgtaagtgcttttacatcaacaaaagatgtcttagatgtcataccgatataaccatacttgttaccgcctccgcggattccataaatcaggtatccttctgcgtccttcacttcactccatgtaagttttaccttacctactgaagaagatgctttcaggttttctactgctgcaagtctttctttttcaactacgacttccttagttgtcggattaacaactttctttccatctggtgatgttacagatgctgtataaacaacttttccttcttttgtataagttgctttttcgactgtttcactatcaatcttaacttctggtgtctgaacatgtgttgcatcatttgcacatgtaaatgttgctgttgttgtccacttaccatctttttcttcccagtctgaccataccggatcgccgtatttgtgaccaagttttgcaattgctacttcttttgtctcttttgcaagtacagtattatcatctgttgatgttactgttgctacataaacatcttttcctgcttcttcacatgtaggtgctttatatgcatctgtatcttttactacagatacggatacatttttctgaacttctccacatacggaacacttcacttcatcaactgttactgaagtgccttctttctgatctgtcttataacctgtgatgtttccatcatcatctttaattgcagctgcatcccagttgaattttacatcactatatgtatgctgtcctgcttcgccttttacttctgtagatactaaatattttacaccgtcttcagttttatctgctgctttgtatacagctgttacaccttcatcacatgttccagcatggctgaccatcttagcatctactgttacagctttatccagtgtcttattgatagaatcacggttcgctttattagttgcattatcgtcagatgaaagcaagcaatcgagcttgtcaattttatctgcacaagattcacatgtaagattctggaatgttactgttgagtaatcatcactccattttgcatctgtcggtacatatgtatgaccctctgcttcatttttaattgctgcatcccagatagcttttctcttctcatatgtggaattcgcctgctcgtatttagatttaacaggttctgtaatacaagcaccacattccgggcatacatagttatctgcttcgtttttaacaccatctgtctttgtatagtatacttcatggaatttgatgtaatgatgttcatgtgctgtattttctttttctacacgtgtaccatctttaatcaaaccacaatcagaacaacgttcctctgtaaatgcatcacggccacaggttgcaggtacggaaactgtttcataattatgagaagtacctgtcagtgtcttcatatcaactgtatcaacgaagttagctgaccacatgaactcgtcattatcattgctctgactgcccatgaactgctgatacttcttgtagtttgtataagtcggattgtaatctgtctcttcgaattgataaccataacaaccggaacttgtatgatcaagcaagccagtcttacctgaaatgaacgcgaagtttgtaccgattgaaacaatcagtttgtcacccttcacagtcagacctgcgattggatgatttgtaacagtaaagtctgcactgtctttgcttgttgttgtaaacgccataccgccaaacagctttgtattatcacgttttgcagatactgtattgtattccttcacaacggctactgcaccgtctgcaggattgtaggatacgatatcgttggatacgttgaagtaaatcttaccatctgtgtacagcgctgctgtcagaccgatagatgggtagatgctctgttcatctacgaactgtgcatacagttttgtcagaaggtcgttcttcaccatcttgccgtctttgagaacgcttacaaatgtatcgtcatcatcgtcgttttccttgtctgtgaagttaatcagtgtctcatagtcactgtcgccatcacctgcatccttttctgtcagtttatgacgaacaatcttgtactctgcagccttctggctctgattcatgcttgaactgtttactctgtcaaacaggtctgtagaatcatacatgtagtacgcataaccgtctgcatagtaaacattgcttgccgcacgcgccatccatgctgtctcataggtcttatcagttgcttcgttttcatagcgagatctcaaagaactgaaattaccatcatataattttctggcacttgtatcactgaacaggaagtatgtatggttcatatcaccgtctgtctcaacacggtcacggctcataacttctgtgtagacatctgtgtaacaaggatccacataaaaccactgtccatcaacctttactgcattccaataatggtcggatccgaagtcctcctgttcttcgccgtacattgtaacatcagactggaaggagattcttacaaggtcaactgtgtaattctttgaagtgtcaagcttgccatctgtatagtacagttctttggctgtcttccagttggagctgtcatagcctacattcgtatctttcagataaatatccttatccagacactgtacaaggtatgtgtaagctttggagtaaccaagacatacggatgtacccataccgaatgcaccaaactgagaaccttcccaataattgataacaccagttgtcataccggttgcagcctgcttcgcatagattggaatcgcctgcttaaagcttgtttccttcgttccatcaccgtccatatccaatgccggatcatcgctttctaactgctgctgagtaatctgctcaactgtcatcttgtaaccaggcgcattctcaggatcaacctcaacgccattttcttcagcatctttgataaaggcatctgccttagtcttcatctggttagctgcatcctcaccaaaattggttcttacatagccatccggatctttgtcaatggcttctttgttctgcttgatatagccttcagcttgctctttcgcggctgctttctcttcatctgtggcttcactttcagctttgcctaaagcctgctcataaaccgcctgctgaatagccttttcatagaactgtgtacgcaaatcattttcgatgcctgcaaaaatctgatcatggaaattctgtttaatctgaggttcataaacttcatagatcgcattataaacatcatcttcatgctcctgcttctgaggatcctttgcaatcatcggcttgtcatcatctgattccttaccggagttcatgatgtaggacatatcaaatgtattgttatgtgccagccagtcattcagaacaagcagcttctgtgcctttgtctgcgcacctgatgctgtaactgcagcaagggcttcctctcttgcatttgttacatctttaccataatactcaatacctaacttatcaccatatgtgaaagtaaagatcatacctgtcagatcatcatacttaaccttgccatctctgacatcctgaacagttttgccgtctaaggcaagcatctcaccaaggataccaagaccatccgtatcatcattgaaatccagaaagaatggattctgaacaccgagtacattggcattatctgcccactgattcagatagttctgatactgcttaacaaccgtatcaatctgttcatctgtcagcttctgagttgtctcctgtccatctgcttcatctgcttcatacaggtctgctgtactgatgttagattcattggattctggccggcttcgccgccgacaatttcaacctcttccagtgcttttctcagactctggatagaaggatcagattcatcaatctccacgtcctttgccatctgttctgcaacagctgcattggcaccctggaagttaattgtcgggatagaaattgtataaccaccatccaccttaacttcattatctccttcttcagctgcctgagcatcagcttcatccgctgtatcctgctcgtccgcctcttcaggagtcgcatcgtcagctgctgtggaatcatcagttgcatcatccgctacagcatcagcttcatctgttgtttcctgaacagctgcggcatcgctatcttcctcttctgctacattatctgtcggttctgcataaacaggagccggaacagatgttgcaagcatagcagctgaaagaacaatacctaaaagttgtgtttttttctttttcatagttctcctttatttcctttcttaaacaatttccatatactctcctctgagcgtcctatctatttctcgctcgtcatcacccctttttcttctttggacctaccctccttccttgactcaaatgtgcctgtaataattataagtaaatgcttcaataaaaacaaatagtaagtccatattaagagtagtataccacctaaaatccggagcgtcaattagccttccataattttacaaattttacaatctgtaagattactcccttcaaaataccaaaagcagatattatgccacattttcattccgctttcacttctttatgtcataatacctgcttttctttatttctgtttgcgcatctcaccaggttctttacacaaagataatatgtactgtccatatggtgtcttacgtaaacggcttcctaacttcttcaattgttctttatcaataaatccttttttatatgcaatctcctctatacaggacacctgcaatccctggcggttctggaatgtcgccacgaaattagctgcatccataagtccatccggagttcccgtatccagccatgcaaagccacgccccagaagttccactttcagttttccctcttgaagatatctgttgttgatacttgtaatctcaagttctccacgttcggaaggctcgacttcctttgcatactgtacaacagaattatcatagaaatataatcctggtacggcatagttagactttggtactttcggtttttcttctatagaaagtacattattgtattcgtcaaattctactaccccataggcttttggattctttacataatatccaaagattgtggctccatcgcgttcattcaccctctgcaaaacaggggagaagctttgtccatagaaaatgttatctcccagaaccaatgccacgtcatcatcaccgataaaatcctctccaatgataaatgcctctgcaagtcctcttggttttttctgaactttatattcaaatctcatcccaagctgtgatccatcaccaagcagttctttgaacacactgacatctctttctgtagtaatgatcaaaacatctctgattcccgcaagcataagcacggaaagtgggtaataaatcattggcttatcataaaccggcaaaatctgttttgaaactgcctgtgtaatcggatacaatcttgttcctgatcctccggcaagaataattccttttctcttcttcatatgatctgctccattcatctactatttacagatgatacatctctttataatagttctgatattctccgcttgtaatgttctccatccagtccagattcttaagataccattttatcgttttacggattcccgtctcaaagtctgtctccggctcccagccaacttctttgcggattttgtccggtgcgattgcatatcttctgtcatgcccttttctgtcttcgacatactcgatcagattttcattaatatgttctctgcgtgggtcagtttccggaagtacatcatagagcagtttcaagattgtcttcacaatctcgatatttctgcgctcattgtgtccgccaatattataagtctcacccagtctgcccttttcctgtaccatatcgattcccttagcatgatcttctacatacaaccagtctctgatattgagtccatctccataaaccggaattttctttccgttcaaagcattattgatgatcagtggaatcagtttctccggaaactgatatggtccatagttgttactacaatttgtaatattggccgggaacttataagtatcaatataagcctttaccaacatgtctgaagatgccttacttgctgaatatggactgtgtggtgaatacggtgttgtctcataaaagaatgtcccatcctcctccagagatccatacacctcatctgttgatacatggaggaactttttcccttctttataggttccgtcttcctgttcccatgcatttcttgcagcattcaaaagaactgtcgttccaattacattcgtctgcacaaaaatctccggattcttgatacttctgtctacgtggctctctgccgcaaaatgtacaactctgtcaatatcgtactcctggaaaatcttatttacagcttctacattacagatgtcttctttaataaagacatagttttcattgttttcaaattctttcagattttccggatttcctgcataagtaagtttatccagattaacaattttaatatccttatactttttaaacatataatgaatataattgcttccgataaatccggctccaccggttactaaatatgttttcattccctgtttccctcgtatttttactatttttatctgatctttttctaattttattttaacataccgttttttaatttaaaataattaattggagatttattgttttttctctgcaactgtttttccatcactgtttgcatatcctttgataatccctatcgtcaacacgataaataccgctccgaggatcatgactactgctgtgtaaaaaactgatattccaatcattccatgcttttctgtgattgtttttccgccaaaaacaaacaataaaaaagctaacagatatcctatattcagcagtttttgttttcttgcgacagtaatgatcatctgaagaaaattaacaattgcaagtgcgcctcctccaattagcaaaatcacaagtgatttcttataatctgtcagatccacaccgtaaattaatgacaagacaggaattccaagtaaatatccccctatgatcgcagccacagaaagcaacaggatcaaagcgatctgtcgtaagatcagtttattgaactgactgatctttttctcatgccataaaagagccattttgctgattaccggctgatagacgaactgactcaaaagacttatcacaaagaccggcatgaaaatgtaggtgaaacatgcctgcgcttcacttgacatcaccttatcaatcgcatatttcggtgcatttccaatgtaaatcaccaaataggatgctataaaaagcggaaaacattctacaaatatatttttaacatttttaatctcaaatgttttcttttttatttcaaatcctcttattgccgtataattcaatatcacgaattgaataaatgatacaagcaaagccactgcagatgtcaggataaggtttttgctgaaataataacatactaagtatacaaaaatataagtgcacattctgatagacaggatctttccggccacatccaggcgaagatattgctggaacattccatgaatcacatcttctaccgcatcgatcacttttgccagacagattagaattataactatagattttgaagaattatacaatcctgatgcaagattcactccgacataaacaaaagatgcaacgatcataattatactcgttatgattctcgcagctgtatattctttaaaactatatttttcttcgacatctgacacttgaaactggcgtattccatattttcctatcgtcatcataagatttcctatcgcaaatgcaatcgtaaatacgcccgcatcgatcaccggatcaatgcgggatataagcatcagtataaatactgtctggaatgcattcagcattgctgcacatgtattccataagtacgccgacttcattttgtccttactgtcaaataaaatcttttttatcataatcctgctcttccatatacatagtgtgctgtaccgcccgctactttatttccattaccgtctgtatgatatgggaatacccagtaaaaattatactcatctcttaatgcatttttatctgtaaacgttgttcctgttgttgtcatgccaatatatccgtaacttccttctcctcgaattccatagacaagataaccttccgcaccttctgattttgtccaggtcaactttacccctccactgacagaatacgctttcagatctgttactgcttcacatttctgagcttttccataaacatatttttccggcgcacttccggcgagcatatttccttctgaatctttacgataagcaaatacccaataaaaattataatcactcgtcaatgcttttgtatccgagaaggaagtcttgctcgtcatcccaatataaccatacttcccgctaccacggattccataaactaaatatccatctgccctctttacttctgaccaggacagattcaccgcacctatcttggaagaagcttttaaattctgaactgcttccggttttttatttgtagtttctgcaccgaaatccatgttcagatctacttttccatcaattccatcaaccgtaccagaatctgtacattgccacattgaatactctccctggtaagtacaggtagaattgtactgtgcaacccaatggtcaactgtatcaaaataagaatctgtcagataatttgtaaaccagtctttattcgcatatactgccacatcatatcctgcatcttctatgatactgcagaatgtctgtgcaacttctgcgatctcttttgtgctcagttcttccctcacactattttcttccagatcatagtaaatcggataagaaagatcatatcctttgatcagacgaagtacatgattggcttcgctttttgctgccgtcacactgtctgcataagaataaatataagtaccaaaaggaattccttcttttgtacatgcatctgcatttgtcttccaatatggatcatcctgacttgtctcatcatctccatatccacaacgtataattgcataatctacatctgttgcctttacttttgcccagtcaatgtctccattccacttacttacatcaattcctttggcaacagctcctgtgatttcttctccctggtcattatagaattttccgtcttcttcataccacgcatccgaagaactgcgcagatattctgctgtatcaggcaaaattggggttccatctttgtatctccagctgttgcttctgtcttttcgttgtgcctgctgtggctctgttaaatcttcttgtactgatgtactttctgtttcttctgcaaatacagtaacagaaggtaatgtttccaaaaccagaactgtagcaaccgccattgcaagtacacgtttaactcccttattcttcatactttcttcaacctttccatgtctactccgatgttgtcatgctgcctgactgcttcattctcctacaatataccagttataatcataatcttcggattttgtcatatctcccggagcaagtacaatatagtaatcatttgcatattccaggcgataatcattcctgtgcaggaatttcataaaccagtctttttttccattgtactgattatataattcactttcaatcaaaacatcgtaattatattcctcaaacccataataattgtttgttctgcagaatataacaaccggtttctcttcccagttctcttttgcaagtttcaggtcttctttcagtttctcttctgtataattcggattggtaacccatggctgtacataagattccatttcattcaatgaatacatcaaaatagctccgccaaataccattaatggacgttctttctcctcatctaaatgatttatgcaatccagaacaccattgacagcatctgcttctctctctgttgtcttcatatattttaatttatcactgttaacagaatatcgaagtgaacttctatccacactgtcaaaattcattgtgcaataaagcatgtctgcaaatttcactcccatgcagacaagaataatccctgtacaggctaaaactgcaccatgtcggattttcaatccatatttttctgtcattacattaactgcttcaagtgcggctttactgaaaacaaacctgcaaacggcggatactgcaaatggagcaatgatccaaaatgcaagaatcacgtgttttgttcctgtattagaacctgcaattgtcagaagtggaagcataatggcacagattccaagaataatcagatctggatttccattcttactatacatgttaaaaaatacatagcaaaaagttactacatacaatatacctataaaaaaggacggacctgttgtcatctgcggccagtttggtactgtatttacatcatatgcataaaccaacatataaacagcaattccaatcactactgcgctgaatgcaatattcaggattattttcttcggatgaattccttttaatgaaaacaaaatattcattcctaagagaagaatcatagaagcagcaagataaataacgcctgaagcaattgcatcaagatttccaaatataaaggtagaccagagattttccatgctgtaaccacttccggccgtagatgcaataccagataatcgaaaaatattattgataaaatattcaacctgacctgtaattgccagaaatgctgccagaactccgaacgttgctgctactcctcccgcaaaaactcccagatgcttcataaaatatttcacatcttcattgttatataaataagagaaaacatagataaagcatgtaaccaatgctgttatactacccattctggaaaatacaaccaatgtcaggaaaattcctgcgacaaaactatatttaaacttcttctcaactacagccttaaattcaaatccaagaataagaatcaggaaaaatacattgaactggtgataattgaaaatattcaaatatgtatctgatgccataattgcaataagaattccgaataatgtctgtaaatcacccaaatatttatgaaataccttatagacagcgaatgccataaccatttccacaattacttccagaagatttaatccccagattcctaatccaccaaatatctgaagccatccccatgcaagtacatttgtcagatagcaggtaaaaccaactttatccggattgctatatatattttcatagttaaacatatgaatcccagtatcacccaggtcaatgccaaagaagctgcaaagaaatggatagagaaaaattcctgcgatcaacacaatcttcgcaattttttcaatttgttccttcttacttaacaactgctcctttttacttaacaactgttctttattcatcctctttcatccttatactctattaatcatttaagtatttttttaaacacacaatatcatatgtatcccatttatatttatcaagatactcaaaccagatatcttcctgattttcaatattttccaatttctttaagaactcttccgtatgttgttctttcggaataattacgactccggtatcatcgcatacagcaatacttccttcatatttatctctgtgttctttttcaattacactgtctaacggttgttcaatgtatttattaaaacagcccaccggactaaatcctttacaccacatcggataattctgcttaatgatatcatttgcatctctcatattggcattggatataatcgcaactgcctctcgatacagtactgcaaactttgttacaagctctccgataattgcacggtcaccacagttaaaagcttcgatcattacaacatctccggcctgcacttcacggatctgttcatgtatgctccagtttgattcatccaatgcgtagatccattttacatttcccaccgcaaaatgccctctgttcaccgcatgagaatctttaaatacgcctgttttcccaagacagtctgctacttctgttgtagaaattcgattcattctgatttttcttatgatttcgttcttaatatccatgttttctcctatgattcgaaagataccttcaatgtattctttacttctttttcaatttcttcaattctctcttttgattctgcacgtgcaataaaaaatcctactctggaacgatcatcctgtgccttctctataatatcgccttctttaaattcaagctgaagctgtaaaatttccggaattgcattaatctgctcaacaccttcaattttggtaatcttctttccttctgattcgatatccagaaattccagaactgctgctctttctttcattttctccgcatctgatatatgcagttcttccacagatggagtatggccaagtgctgcattgatcagcagctgatagttgtctacccctgacataaatggaacaatatctgaagcaattctgcttccacctccacgtgccgccatctcaatcagataataatctccatcttcgaacttgtattcggaatgtgtgatcgcatatttaattcctgttccgctgatcagctcgtcatttgtttttctgagcaggtcataatcaaatgtctcattgtagttcgtaaaaaacaactttgaggctatatttctgttataagaataatgttctttctgagagatcgccagtgtatggtgtgttccatcaatcacaataccatccactgtaaattctgtgccttcaatatatctctccacaagcacataatcaccactatttgtaaacgcttccgtctctgcgaatcgatccctcaattcctgttcggattctatcgtaaatattccacggctggactgggaatccaatggcttaataatcaccttttttcccaattctctgtagaactcgattgcttcttctacatttgtacataatctgtactccggatacttaaatttattttcccggcaatactctctcattttaaatttgtttgtaaaaagttctgccatttcatgaccaattccaggacaccccatctgttctgcaacataagctactgttggaacagcaatatcactctgatctgtcaacactgcatcaatcttatattcctttgcaagtgccagattcttctctttgtctcttacatccattacacctgtaaaatccgcgtacttaaatccaatagaatcttcataaagatttgaattcactacttcatatcccaaactttttactttcttaatcagtggaacctgccatgttccccctgcaattaccattactcttttcatcattcgctccgaccttcctttaaatctacaaccttttttacaacaggtcttctccgtcttttacaatactctctattacatactgtggctgattattgatacacatataaattcttcctgtatactctccgataattccaagcacgcccaggatcagacctcctaaaaacagtgtaacagccatctgcgatgtatatcccacttgaattgtaggtataatcatttttcttattaatgagataattcctagcaacactccgcatacagaactgataaatccaagtgcacttccgactcgtaaaggtttaattgaaaatgctgtaaatccattgatccacagttttaataatttcttaaaattatagccgctctttcctgttgctctttctctctgtttcagatgaacatttcctatctttcctgatgttctgagtagaagtcctgcaatgtaagggtatggattctgatatttgaccatctctttcactacaaatctttttgccataaaaaaagatgataatcctatctctttaggcttatcaatcatatgatacagcataaattcattcacttttgtaccaaatcttcgaacagccgatttctgtgtagtctctgtatattttgcgcagactacatcatatccttcctgcatcttgtcatagaaatcccagaccattcctaccggtgtctgtccatcatcatctgaagtcataatatactttccggatgcctggttaaaccctgccagcaatgcgtttggctgtccgaaattcttagcaaaattgattccgatgattcttccattttcttttgaaagccgattgatcaatccctttgtattatcttttgaattgtcattgaccagaataatctcatattcaaatccttctctttttttcattgcagcctcaatctcgctgatcacgccttccagattcttttctgaacaatagcatggaattacaaatgaaatatccattcaatcatttcacagatcagattttctaaagcattaaaatccgacctgtgtactcctttctctttatctcgtataagccatctctgtacttttcttattttccagacagatactgcgtgccggaacatagacactatatggctctgtattctctttgacaaatgcacctgccccaaccaatgttgcatattccagtgtcctgtttccaagtaccgtactgttaattccgagaaaacaattattctttacaactgtttttcctgcgataacagaatccactgaaaagaaattataatctccaacctgcgattcatgtgaaatctggcttccgttccatataatgttggaatttccaatctttgttccatacgccaatgtaacatgttcgagaataatattcccctcgcccattgcaatactctcgtctactacactcggatgaacaaaattttcgatcctatatccttttcttttcgcatcttcaaacttctgctgtcgaatctgattcattttcttataaccaagcgcaataaccatcgtatattctgttggtggatatgctttttcaacttcttcataagccactgccggcagaccatcataggtatcactttcaagatatgctttatctaccgtatatgccacaatctgtacgtctgcatatttttcaaaataatatcgaagcattttcccaaaatctgtcgtaccaaagatcacacattttctcttcattcttttatcctctgtttttactataccggttcttttactttccactataaaatgcttttactttctccgcaatgtaatctacattttctgcttcgagtccataatacatcggcaaacgcagaagtctttcgctttcagtcgtcgtatacttatcttccccacggaattctccgtatttcatacctgccggagctgtatgcagtggaatataatggaatacggaaataataccattctctttcaagtatccaatcagtttctgacgttcctccagatctctcgctttgatatagaacatatgagcattatgtacgcaatcctcaggaataaccggcatttcaatctttcctgcttcttccagttcctttaaagcttcataatatctgttccatgttttcattcgatcatcataaatctcctgtgctttttcaagctgtgcccagagatatgctgcattcaattcacttggaagataagatgaacccgcatccatccatgtatatttatcaatctgaccacggaaaaatttacttctgtttgttcctttttctcttacgatttctgcgcgttcaatatcttccggatcacgaatcagaagtgctccaccttctcccatgctgtaattctttgtttcatgaaagctaaagcagccgtaatcaccgattgtaccaagtgcttttcccttataggaagccataactccctgtgcagcatcctctacaactttcagatcatatttctgtgcaattgcacaaatctcatccatcttacaggctacaccggcataatgaaccggaacgattgcttttgtcttctccgtaatcgcattctcaatcagcctctcatcaatattcattgtttccggatgaatatcaacaaatactgccttggcacctcttaatacaaacgcatccgctgttgatacaaatgtataggacggcatgatcacctcatcccctggtttaatatccagaaggattgctgccatctctgtagcatgtgtacaggatgtcgtcaacagtgtcttggctgttcctgtattttcttcaatccatttagaacattgttttgtaaatgctccatcaccacagattttatgattttcaattgcttgtctgatataatcgatctctgttccgacgattggtggtacattaaaattaatcattctcttttttcctcattcctttgaaaacttccatatttgatagccatctaactctttgtataattctgcctttgcttcaggataataccgttcctgcaaatactgcactttttgatctaaagttttccactctgaatccacaagatataccttctcatttattaatgcttttaatggctgttcggcatcatatgtttgtaatatctgattgcaatccgggaaatttgttgttacacctgcaagatataaaacattgtcaaattctcctgtcggaattgctttccacggattccagtcataatagaacacttgcatcattgtctgaaaatccagtaaatacaaatttttcttatgtgtttctatctcattgatcagttcttccgacttcgcccctttattgactattttgcgatatttactcgctttatagttccatgactcataaaatgtattctctatatattccttgcgcccccaactatctacatcctgataggatcgatccggtaaataaagcggcaattgcaaaaatagacatactgtatttattataacacagactctcctatattcaataaattctcttttattttcacattctaatttttcccaaaagtaaaagagtgttaaaaatccacctaaaaatactgcatattccgttcgatacacggttctttcaatcaaaaagcaatataaaatataggcaaatccgattccccatatcacaattgctgtccaacaattttttctctgaaaaacaatacttaatattgtaagcaccacacaggcaaggaaaacaggatatccctgtaaaccacggttctgtatctcttctattattacctccttagatatctctacattttttttataatcctgtataatatctgcggccttctgcataatgtctaaagagaagacttcattatctgcaaaattccagttacgcatcatcttataatcattttctgaaattccgattttctgtaattcttccgcgtacgcttcatatccgtaatcacttgcatctacgattgcagcccttgcttcgctatattctttgaagtatttgtattccggatccttattataagaataatcatcaaataacttgcagcctgttactactaagatcaacagcagtcccgcactgataatttttctcatctttagccaaaaacgtctgtgatccgtctcatttttccacaccctgacaatctctacaataagaataaataaaaggaaaccgcccgcgagataaataatattaaacctgaaccacgttccaattacgcacaaaatcgccgccgatatctctatccgcaacgatctttgttcaaacagcgcccatagaaacacaaggctgcctgccatgacagctatcattgctgtttttgtgaactgcataagaatatacgcatcactgccaaacacagtcaataataaagttattaccataagcgccattgatctgttcaattttttcaataacatatatgaaagtattgtaaaactaagaaaacagagtaataactgaaaaataagataccaactgatttctggtaaaataagatagaatggggtcaacagatatccccacaggacattgataaaaatcaaatgtggatttaaactccccccataagctcctgacaaaatcgcagacatcacaaaatcatctgacacttcatatttgacatcacaaaatactaaaattgaagctaaaaaaagaagattcaatgtgatagcagacaatatttccgatttccagatcttactgatacagtttttcaaacttgtttttttcgtcttatccatacttctcaccttctttttttctatttaatcagtttcctgatctctattgttcctatttcttttcgatatagttccctacaatctcccagaccagtttttcttttgtcataaggagtacaactccataaatcccaaagaacacgcatgcgctgattgcaagcattacaaatgactgtatctccatgctccagccaaatgattctaaatcaagcaagcccttcactaaactcccaccgatggttgccactacaatcgctactccaattttcataccactgacatcccgcatgatatcctttaatatctctttcaaatacacacattgaaccagaagtaccaccaattcagctatcacagtagcaagtgctgcaccggatgatgccatcttcggaatcagaaccagattcagaaggaaatcagcaactgcaccacacacgatagaatttaacaccttctgttcctgattctgtggcgtaagaatctgaatcccggtaatattagacataccgatcaaaagtactgtcggcatcagaataatcatcggaagtaccgcgccctgatacccgtctcctgcaagaaactgaatcgattctgatgcatacagcataaaataaatggtcaatggaagtcctgctacaactacaaaattgactgctttcccgatcattctgtaaaaatcttctgttttttctttcttaatataataagaaagccttggcaaaagtactgttccaagagaagtgatcagcgtaacaagtattgtttttactttaattgctgcattatagtatccaacttctgtattcccctgcatgaaccgaagcattacaacatctagattcgtataaacactggttgcggctgccattgcaaaaaaacgcaaaatcggctttatatgtatccgaaaatcatatgtcccacttttcttaaaagaaacaaattttgttgcatacacaaagttaaacacataagatgcagagctcgcaaatacagtaattcctccatagacaatataatcttccggattatgtaccagaaggaacatcaacaccagtgataatagttttacaaccatgttgcataccgtaatatacgcgtactgctccaatgcgttatatagccatgtgatagcaaacatatttagaaccattccgattccgttaataatatataattctttttctgctgcaaactccggcactaacgctactgtaactacgaaaacgatacaggttaaaaacatcgtaattgaattgatgatcaataattcctgcactgtttttgacaatttttctttatcatctcttacttttgcgcatgcccggattccataggttggaatccccaaagatgcaaacatattgaagtatgttataacagcactcgctgttgccaccttaccatttccggttgccatcaagactcttgaaatgtacggaaatgtaatcagtggaaatacaattgaagatgctgacataataaaattcatgataaagttaaatttaacagagtgaatcttcatattacgacctttctttaaccatttcgcaccttactcaaccggacgatcaacgagtaaaatctaaatccggattttctcaagagacgcagcattccgctaaattctccggatttttcgtaaacatatgcatttttttcttttacttctgcatcaaattctttaaattttttctgtattactttatctccagaaccaaagcttataaacacatctacctgtccatgcaccatttccgctattctgcgtgccatatacaattcttttaatttatcataatctgctttttctttgtaggcattaatataatcaagtacatgaaaaataacgtcaatatgattctgcatatgtttctgatatcccagcatgctcacactctgattcacctgtgcaagacgatacatataaacaaaaatatcaaaataaatcacatttttcacatacgggattggatacaaaatgtactctacatccacatagaagctatgttcgtctaaacgaatctgattttcttttagaattgatgtttttaaaacaagcgcatgcatagagattctcgtctcatttgcaatcatctcaaacggcatctgttcttcttttctgatttctggaaaggtaaccggatttaattcgcctgttacgtcattcacttcataataattagtaaatacatagtctgcatcgcatgttttcaatctttgaatcagttctgcaaatccatcctgatctacccagtcatctccgtctacaaccttaaagtattttccttttgcttcaccaatccctctattgatcgtagaaccgtgccctccattctccttagagatcacgcgaaacgtatctggatatttttcttcatactttcttccgatttctgctgtcttatctttcgaaccatcatcgacaataagcacttcaatatcatccaacactctctcatccacaaaggagtccagagtgttctctaaaaatttttccacattataggaaggtactgtgaccgtcagtatttttttcaccttttctacctgctttccgatttttacatttttgttgataccattcttctggctttagataaaagacgcatcagccaatactgtttgtaattcaatatccataaatgaagcttatcttttctactccattgatttatgtatttattattcttaacattcccaattcttgactttgcatagtctctgtacttctgaagatatgtcccatcctctccctcaagcaccagttctttcgatggttcaaaataagcatttgccaagacaagatattctaattcttcacgataagtttcgtattttccattttcacgatataccgacaatatatgatctagtacttccattttatcatgactgcttttctcatgatttttccctgtcataattgaattctcgcgaataatataataatataatggttcttttaaataactgattctttccgctttcaggaaaaatatcggtgttgttgccagatcttcaaaatataacccttttgggaatggacaatctgctttcacgtaaaattctctgttgaacaattttgcccaggctgccggtggtgcaagcaataatttgtgttccttctctaaagaaatcacttttccgccaggaatctgtgttgtccgaacttcctctatcccgttttccacgcaataataatcaaacagaaccatatcgcatgccattttttcagcttctgccactgctttttcaaccagatctttcgctatgtaatcatcactgtctacaaatagcaaatatttccctgtagccagttttacgccggcatttcgtgcatcacttaatccaccattctgtttatgcagcacttgaattctattatccttttgagccagctcttcacacatttcaccgcaacgatccggcgatccatcatttacaagtataatttccagttcctgatacgtctgttcgcagatgcttttcacgcaacgttccagatattgttcgactttatataccggtacaactacacttaccagttccactcacattacctcctgctgactgctgccagtctgtccttcattcttctcaactgagacatcaataccattattccatacattcgatactgtaatagtttcaagaggatcttatcttttcctgctatctgctgcacataataattcttattcatctgtggaaatttattgtatgcataatctctgaacttcttaagatattcgctttttctgtcatttaatacgatttcttttgatggcacgaaatagatattttcaaatacgagatattccagttcatttctatatgtctctataagattttctctttcaaaatattcaagaagttgatctaccgcccatgtacgatcttcataattcttttcaaaatttctgctgtgcataattgatccgtcgcgcataagataataataataaacttccggcaagtacacgatctttttcgtctttgtcataacttttggaatcgttgccaggtcttcataatatctcccctttggaaattgaaagccactttctttccaaagctctctgcgaatcagcttatttacagccgaacaggatctcatgatcaattctttttcttctgcaacctctatcacccggtttgctgaaaaaggaaatgtaaaccgatctgtcagatttccattttcctcttctccgatataatcaaagataaccatatccgcctgatttttttctgctgtctctactgtatcacgcacaagattttcatggattctatcatcactgtcaacaaataagagatactttccttctgccttttccacacctgcgtttctcgcatctccaagtccgccattctccttgtggattacttttatacgtccatcccgctctgcatattcatcacagatcacaccacttttatctttcgaaccatcatctacaagaataatttctaatccctgatagctttgcccacatacactctgaatacatctggcaagatatttttccacattatagacaggtataattacacttacaagctccatattttgctcctattatgatatagtaaaatgatcagttcactttttctaattatagtttagcgaatcaaactcttcaattcctgatcctgatttgcaagatcatactgttctgcattatcaaggaattctgctgattgtctttccattctgttgtctaaaatttcctcagcccagtattttgctcctgattttagaggaataaaataacacgcttccgttattttagattcttttgttatctcatcactcataaaacacggtaaacctgctgactgtgcctcgattcctgcgattggaagtccttcaaaattagaaggtagtaaaaatgcgtccattccctgatacagatagtccgtatcacttcgtcttccaagaagttttacaacatcttccagattcttttcagcaactatttgtctgactttttcaaatctgactccgtctcctgcaagaagcagaactgtgttgggatcttttttatgaacttcttcaaatacatctagaagaaaataatgattcttctgatagcagaagtttcccacatgaccgattacaaattggtcagttatccccatactccctcggatttcttctcttttctgcacactgtacttatatttttctctatccacagcattatgaatcacacaaaattttgatgagctcactattttttttggaaataaccattcgccggctttcacagaacatccataaaattctgttccgtatcgatataaaaacaagcggcagaacttatgaatcccgttaaatagatttctctttaaagcactttcacagtcatttccactggaatgactgtgaatcattcttctctccacccccgaatgctttgcggcaattgccgcaatacagtcaatagctgttgagatattcagataaacggcatcatactgcccctctttcataattctacacacttgccgatattgagacaccggatgtttcaaattggcaatggcatataaatttgaatggaatttttttaattctgtcggtaattctacgtcgatttcgttcgtgagaaaatcgatcctcacctcttcatttgacacttttgtcaggaaattcaaaagatatttatcaattcctcctgattttccatccatgataaatcctaccagaagctttttcatcccttttcctctctacgaacctgatatgaatattgtaccagataaccactgaacacccataaagcaaaagcacttggggaattcgtatagattccgtctaataaaagcaacatacttataagtactgttcctgccacagcaagaattgcgataagatacaaactatcactgtccgatttcttaaagaccggaactaaaacatattgtataattctaaatgtgatcaaaaggaaaagaacaaatccaagaattccctgaaatgccaaagtattaaaaaatgcattgtgcatactcgtataatcacccacttcattatttacagcatatgtctccggcgcatgttcttttgcatatgaaataaatgtggaatacccagctccgtatataggacttgtctgccagacttctactgcacttttccataacgagattcttccattggtagcatctttttcaatattctcatgtcttgctgtctgaatcttgtttcctttcttcgttttcgtagaaattgtagtctgaggttttgtagtcttctgtgcagttttatttgccacttcagtctgatacctggtattttctgtctttaatacctgcattcctccaactgacacaatcataatacacaatacgatcaaaagatttttaacatatctatacttcttgttttcactcttcctatgaatcaggcaaaaatataaaagaaatcctccacacaaaacaaaagcgatctcaccggttcttgaatctgaataggttacatatcccaaattaagtaatgccgcaattacataaaaaagtttctttattcctttctgctgaaatatgaataaaacagccaggataaaacctatcacactaaaaaccgctccataattagggtctgtatatacgccccataatctatcccaggtatacccggtaacaatgaattccccctccggtgttgtaagatattccgaataagattgaaccatcataacaagacttgttacagcagatacagacgttacaataatcatcaagtgtgaaagaatattaaattcttttctgtacttctccgtgtcacgatccagatcacatacgtataatgcaaaaaactgaattcctgtccagagaatccatttcagattatctgtcatgccatactgtctattcataaatgtactaagcagaaaactcagacaaaagaatatcatcaagatcagacatggcatttttctatatttcttccagtttataatgcggaccaaaatcacaaataatcctaacactaatgtcaatttcacaaggattggctgtattggtgatatataaattatagaaataaatgtcgcaaatgccagacatagataactgatcttaaatacaagttctaatatttcttcatagttctgttttaatttgtccattagatcccctttgcacttcgtgtctatctcattagtatctgtctcgctagttcctgttctgatttttctcaatcaatcctcgaattaattcttctatttttcggtaagactttggtctgtcaaactgctcttccgcaattttgcgtgccttttcacccatttttactcttgcttcttcatttttataaagcttctcaatcatatccgcaagaatatttacatcttccggaataatattcacaccaaagccatcgtttttcaccttcgcacggaattccggactcatacaggtattgatcattggttttcctgctgccagataatctccgatcttcgtgacaatgctctgcggagccttcttaacaaaagagttcaccagaatatctgatttcttaagatatgctgccatcagatcataaggtgcatatccaacaaattctacatttgatatctttcttgaatttgcaagttcttccaattcttctttcattggtccaccaccaagaatttttatcttaatctgtggcataccgcgttttgcaagttcttcacctgccaaaaccatcgtacggatatcataactcgttccgatcgttcctgcgtacgatacccagaattcttctttatcttttacaatctcagctgtccgctgtgctgctcccgcatcgaacaccgtcagttcatttcccacataaactgtttctctcggaatatctctgttccgtcttttaaacgggcggtcacggtattcatccgatgtaccgatcactccacttgcaagtctgtaaactttctctgcatctcgaagcagggaataaaaaataatatcacttatcaccggaatatctattatcatcctcattgcttccggccaaagatcattcacatctgcaacaaacggaattcctttcttctttgcatattctgctgccgccagtgctacgtcattcggtggaatctcagcatataaaagatcatagtctccctctttctcaagaagattcatcaggttctttgctgcaattctatgactatagattctacgtagatcaatatttttcttatatcccggctcataaatgaacttgaccccaaatttgtatttttcatttttaattttttccagatcacgctgtgctttttcccaatgctgaaaggttgttgtaatcagatcaacctgataaccagcatctgcgagaaattcacagacagaacgaaatcttgtataccctttttcatcatccagacgaattcccattgtaataactgctactttatacattatttttctcccgcttgatatttctttctatgatctatctctccgacttcgtctttgaataaatcacaggcattcctgttcgcacaatatgcaccattcttccaagtgctgtacacaaaaatgtggaatgtgtgttcaaacattttaaagtaatcttaagtgccttactgtccttcgcttctgcttttggaagcagctgctgaaacagcggatcccggaatacttccctgcaaaattgctttcggtcttttgagttcattcctgactgatgatcgcaatttctttctaaggctgaaagaatatatcttccatacagtcctccaagaatagcaccgtgttgaggcgtatctactctccaatacctctgctgattcagtaacatttcaatacgtcttctgtgaagcggataataatccggtacaaacttagttgtcagacttcctgtcattcttttcgcataatgatacggtgcaatattcaataaattcattgaatcaatatcattacaataattaatattaaatacgatatcctcaatcaatctgaccgtttcatagcgaaatttattttctttgatatagtccagatcatacactttattccacgcataaccataaatcgtctcctgttccaatcggatcatataattatggatttcttcaatatccgtaaaatatttttcttctggccggatctcatgggcataagcaaagcttccatcttcattgtaatattcttcaagatgtccaaaaacaacaagttttgctctgtttttttctaaagaatctgccacttgttgtaaaaggtccatgtctactgtatcatccggatccataaaccagatatatcttccggctgcatgttgaatccctgtatttcttgcttcactgagccctttattctgttcatgatgtatcacccggattcttgcatccttctcttttaatttctcagccagacttcctgttttatccggagatccatcctctacgataattaattcccattcctgaaatgtctgggattctatactctctaccgctttggcaagatatttttctactccatatgccggcattacaactgtaaataatgggcgtgtcttactcatatcattttccttaatcatcttttctctataacatcacgattcccgcagacaaatttctgcctgcgggtttctctcgttgtctattactctgttgttgttccgccttccagagtttctccgttctccactttatccatagtttctttgatcgcgtctacagactcctgatttggttgcattacatataaaggcttaccggaataagaataacaatactgagtgtctcctgttccatctgctgccattgatgtaattgtccattgcgggttctcagaaagctgggttttaatcaattcctgaatctgagcttcagacatatttgtttcaacatttccacttacactattaagaattccatttgctcctgtcaaaattgccggagataccatcttcttgatcattgctgtaattaccgcctgctgatccttaccgcgctgattatctcctcctggtacattctgacgctctctcgaaaatgctaacgcctgttttccgttaaagtggttggttccctgtacaacatccatcacaagtcctgaatcttcacttgttgtaaaggcatactcagattctacatctactccaccaagtgcatctaccattgtgatcagggaggtaaagtttactcgcgcgtagaaatcaagattcgtatcatataacttctctaatgtcttcatagacttatccacgccatagattcctgcatgtgtcagtttatctttctgtccacctgaaacctcaggaatttcgacataataatcacgcggtgtggttacaagcaggatctggtgtgttgttggatttacttctgctatgatatttacatcacttcggctgtttgtctcaattgctccataaacatcaataccactgatgtatacactgaatgtatcatttttcacttcaacatcagatgaggtatcttctatctcagtcttaatgtcatgggaataaatcacttttgtattatcttcatacccttcaaatgcttcttcaagaactcctgtaaatccctgattataaataatcgcatctacttttccatcatgaagagcctcggcctgttctgccaatgtatcatactcttctgtcttaatttccgttccgagttcttcattaattgcctgaacagtctgtttaatctgatctccattcatcttatattgtacaccaaatgtgtaattttttgcatctttgattgcctctgctgaatcatctgccataacagatacaactactttatctagtttatactctccaccagagattttggaaaccgttccacttaccttgaacagataatacgaactaaaaatcaacaatacggtaatcaatacgctgataatttttcctgtaatcgcatttttcttggaaaagaactggcttgccagaataattccccaaaacagcaccaatgctacagttgctgcaacaacatactttgtcggaagcatattcaatttaaatatgcctgccataaaaatccctgtcgcaataagctgaacaattgccagaactaatccaattgttctgctgagtttattctctctctttttcacctttctccttcggcgatgtctgtcagatgtattttttctattggaatgtcttttctttcttcgcacatcatttctttcatcagaaggtctcctgcgccgagatcttttgtcctgctgactcatattctttagtttccttccctgtaaatcattctctatgtttctatctgtcgctttctaatggcactgccaaacgcaatttctacgcttaacagcccatgaatactaatttaatataccatttcaaccttcatttcgcaacataagccttgtattctaaaaaaatcttaatctttttgatctatttaaaatacttttacttcctcacgaaattgttgcttttcttcacaatcattcaaactttcaatcagttctgctacaacttccgggatctccggtctgaatttcatataccagtcaagcgtctcgcggatgtatttcttgcgaaacttctcatttgcacagaatgcgctctgcagattatgaagacgatctgcccctttcactgcatatgccatagaatttgtcttaatccctgcaatataggtctccatacaatattctttttccttcgtcaccagcttcactgcttttaagacatcttctcccccgatttctacaatctcctgttctgaagcatctgtatcctctaaaagatcatgaaatactgccgcaacccgatattcaacctgcttaccatcctgccgaagaatctctgcaactgcaatcggatgtacaataaaaggagctccacctatccgaaactgtccttcatgcttcttcttcgcatactccagtgctttctggtatatctcttctcccatgatatcctcctttgaatcttccatatttctgtatcatccggccagtatcttcctgttgtttcgataattttagtatacgttgtatttctcgtaaatgcaattctatctctttaaactttttcaccaaaccgctcaacttatgttataattagaaataggttttaagagatttttatatctctgactctttatcgaaatccgataaaaatccgaatcaagaaagtgggtaacaactatgtgggcttacaatgaaactttttatcaaatctacccgatcggattctgcggtgctccggtacataatgacggagtaacagaacaccggattcttaaaattggtgaatgggcagaatatcttggtgatcttggaatcggttcaatcatcttgaatccgattttcgaatcagacaaccatgggtatgacacaagagatttccgcaagatcgactgtcgtcttggaacgaacgaagactttaaagaagtctgtgaaaagctgcatgataacaatgtaaagatcatgctggacggagtattcaatcatgttggacgtggcttctgggcattcaaggatgtgcaggagaagaaatgggactctccgtataaagactggttccatatcagcttcgacggaaacagtgcgtataacgatggtttctggtatgaaggatgggaaggtcattttgaacttgttaaattaaatctgcagaatcctgcagttgtcgactatctgcttgactgtgtcaagatgtggattgaagagttcggcatagacggactgcgtctggatgtagcttattgcctggatcataatttcatgcgccgtctgcgcagcttctgcgaggaactgaaaccgggatttgcactgatcggtgaggttctcttcggcgactacaacttaatcgtaaacgacgagatgcttcacagctgtacaaactatgaatgctacaaaggaattttttcaagcttcaattgcatgaatctgtttgagatcgcacattctctgaatcgccagttcggaccggaccagtggtgcatttatcgtggaaagcatttgatgacatttgtagataatcatgatgtcacacgtatcgcaagtatcctgacgaacaagaatcatcttccgcttgcttacggtcttctctttggtatgccgggtattccgtgtatctattatggaagtgaatggggcgaggaaggtgtgaaagcaccggataatgactatgcacttcgtccatgcttcgaagagccgaagccgaatgaactgactgatttcatcaaagaattgattgaagttcgcagaaacagtgatgctctttgcaatggttcttaccgaaatgttgtcattacaaatcatcagctgatctttgaacgccgcactgataatgaacgtgttctcgttgcgatcaacgccggtgattctgagtttactgccggaaatggagaactgcagggtaatttcacagaactgcttgcaaatgctgatgaaatagaaaatataactctaaacggacagctgacaatgccggcttacagtgtacagttcctgaaagctgtataagattttactgattaagtcattagaaaaaggatgagtggtaatgtatctcacatttaccattcatccttttctttttataacttcttcacaaaaagtgtacgcatcgcattgagtattgcaagtaccataactcccacatctgcaaagattgcgagccacatatttgcaattccaagtgctccgagaatcaggcacacgccctttactgcgagagcaaatacaatattctgatatacgattccgagacatttcttagaaattcggattgccttaacaatcttcaacggatcatcatccatcaggacaacatctgctgcctcaattgccgcatcggatcccattgcccccatcgcaataccgatatccgctcttccaagaaccggtgcatcgttgataccgtctccgacaaatgccagatttgccttcgccggcttctcagccagaagtctttctacctgctccaccttatctccaggaagcagttcgctgtgaacctcatcaataccaagatctgctgccacctggtctgccacctgtttcgcatctcctgtcaacatgattgtcttctgaattcctgcctgtttcagtttcgcgattgcttctttagaagtcggtttctcaacatctgaaatcacaatgtgtcctgcatattcgccatcaattgccaggtgaataatcgttcctaccttatggcatgtcttatatggaataccaagacgatccatcagctttgtatttcctgctgcaacgctttttccatctactttcgctgtaattccgttcccactgatttcttctatctcactgacacgggaacgatccagttcttttccgtaagccctctgaatactcttgctgattggatgggacgaagcactctctgcaagtgccgcatactctaagagctgcttttcttccatctgattatgatgtactccgaccacttcaaaaattccctgtgtcaaagttcctgtcttatcaaaaacaacatattttgtcttggacagtgcctcgagataattggatcctttcaccagaattccctcatggcttgccccgccgattcctgcgaaaaagctaagtgggatgctgataaccagcgcgcacggacagctgattacaagaaatgtcagtgctctgtagatccagtcattccactgcggtgcagctcccattgcaaatattctcacaaatggtggaagcactgcaagtgcaagtgcgccatagcataccgccggtgtataatattttgcaaatttagaaataaagttctctgatcttgattttctggatgtagattcttctaccagttccagtaccttggataccgttgattctccgaactcttttgttgtacggatcttcaacacacctgtcagattgatacagccactgatgatctcatcacctgtcttcgcttctcttggaacgctttcgcctgtcaatgcacttgtattcaatgtggatgtacctgctacaaccacaccatcaatcggcactttctctcccggctggacaatgatcactgttccgatctcaacttcatccggatccacctgctcaagctttccatcctgctctatgtttgcataatccggacggatatccatcagttcactgatattcctgcggctctttccaactgcatagctctggaaaagttcaccgatctgataaaacagcataacagcaaccgcttcattaaagtctccggacttctcataaaatgcaatcgcaatcgcaccgaccgtagcaactgccatcaggaaattctcatcaaatacctgacggtttaagattcccttccatgctttcttcaaaatatcgtaaccaacgatcagatatggaatcaaaaataatacaaatctgataattcctgttaccggaaggaaattcaatagaatcaggagcaccgccgcagcgatgatcctggtcagcatcttcttctgcttcttcgtcattcttctcaccctcttacaggtagatctcgcaatcatcctctaccttcttacaattcttcagaacgtctttcataacgctctttgcatcctgtccctcttcaaactcaacgatcatcttctgtgtcatgaaattcactgttgcattctgaacacctgctgtgttctttgctgcatcttccatcttgtttgcacagtttgcacaatccacttcaatcttataagtcttcttcatctttctcttctcctttaatcttctttgatttttgatctttgactctcatcaaatttcttacatcttctcttatttttcattaaataattaagcagttgtttaatctttatatttacattatagctctccaaatgaaaaagtcaatacatttggccatttttgtgttacaatacatttatgattaaagggatactgaaggtattcttgaattgtaactgttcagagccaagcaaaatttcataaaacaggtgtaaaatgcttgcatttttaaaactgtttttgaaattttatttggcggatacgccacaccgacgaaatgcgtagcattttggaggttggctctgaacagttactataatatttttaaaggagattgtttatgactgaccatattttaccacataatcatggtgaacatttgaatacaaaacttcttatagataacattgcaaagacggaggacttccagattgtagctgacctgttcaaagtcctcggagataacagcagagtacgcattttctggcttctctgccactgcgaagaatgtgtgatcaacatttcttccatgatggacatgagtagtccggcagtttctcaccacctccgccagctgaaatcttacggactgatcacaagccgcagagatgggaaagaggtttactacaaagctgctgacacaaaccaggctcagctgcttcatcacatgatcgagcaggtgattaaaatcacatgtcctgaagcttaactgttattactgcaatatcacgcaattaaacaagtatatcaaaacggaaagatatgaatttctcagagatattcacatctttccgttttcttacttaatttattcacattttgtaactgttcataagaaagttttacacttcaccatttttaaacttaatgatcatttcattcgtcaaactgtctctgctcggctccaccggaatctcatccctttgaaaccattctgccagtgccagttcttcccgatctaatgtaatttcttcctctccatccagatcgcaatagaaccccatcaggatcgtatcactgaaagaccacggctggctcttataataacgtatgttcttgactttcagtccgacttcttccatgacttcacgctgaacagtctcctcgattgtttctccaatctcggtaaatcctgcaagaagtgcatattttttatatgctctcccggcgtattttgacatcaggatcttatctccgtcagtcactccgataattacggccgggcaaatcttcggaaattccatattgccacaatgatcgcaacgcatcatacgttctttttcatcatgtctcatcttatgtccacagcgtccacagaacttgcgattacgataccagttgttcaactgataaccggtaattccggcaaatgcaagatactgcggctctgcataacggaaagattctttattctccattgtaaactctgacaaccgttcacggctaatgttctgtaccagataaaagcgttcctcgtcaatcgtaaacagataaactgcttcttcataaatctcttcattaagccgttccaaatcacgaaatcttggaaaatcaattccatctttccttttcttcagcagtgcactttgtccttcgtaatacaatgcatagctctgcgcatccggagggcatggtctgtactggttatcaaactgatgtggctgtatctcctgaatcataattcttttcctttcttaaacatagaaccaagaacccagagaactccacctgctccaattgcaaaatctcccaggttatatgttacttgatccaacttttcctttcctgtcttaactccgatgtaatcaacaaccttctctttatgataacggtccgtcaagttactccaagcacctgctgccgcaagtgtgattccggtttttcttaaaatattgctgttccctagaagtgtcagcatctgtatcactgtcacaatacctgttcctgcttctgtaagctttttcactttttccggtttatttgcaaaaactcccaggcagattcccggattatgaatacgtcgaagttccagtttctctgtcagtttcctcttttcacccatcttgagattcttttccacatagtgctttgcccattgatccacaagaaataccgtggttccacccaacggatagaatttatttttcttcacgctatcatctcccagtcctttcatattacaattcaaagtacctgttcccggcaacaatttctctacagcatttccagaaaatctttttctgaaataatcggaactccgagatctcttgcctttttattttttgaagatgtggaatttacgtcattgttgatcaaataatttgtctttgatgtgacacttcccgtcaccttaccgccacgtttttcaatctcagcctttacttctgcacgatttgcaaaatgttcaacacttccggtaatcacaaagttcactccggcaaatttctggctgtcttctgttacttcctcttcttctaattccacttcattaagaaggtgtttaaagagttcctgatgatcttcctctttaaaataatctacatagctcttcgccataactgctccgacaccctgaatctcaaccagttctgcctcttctgcctgaagcacgcgttgcgaatcatttccaagtgcccggcagattaccttcgcattcgcacttccgattcccgggattccgagaccataaaccagtcttgcaagtgttgtctttcttgccttttcaatactgttctgaagtttcaggaaagatttttcgccaaaaccatccattgtcataatctcatctctgtagttgtctaggtggaagagatctgtaaagtctttcacatagccgtggaaaataaatttctccagtgttgcctctgaaagaccttcaatattcatcgcatctctgctcacaaaaagagcaaatgacttcacatgctttgcctgacatttcggattggtacaatacaatgtcttcgtctcattttccatggaaatctttgtctcgccgccgcaaaccggacagactttcgggatatctttcactccgcttctcgtcagattctctgcaatctgcggaatgatcatgttcgctttgtacacctgaatctcatctccaatgccaagttcaagttcttccataatgctgatattatgaacacttgcacggctgaccgtcgttccttcaagctctaccggctcaaaaaccgccaccggattgatcagacctgttcgtgacggactccactcaatctcaagtagctttgtgttgcggatctcatctgcccatttgaaggcaaaagaatctcttgggaacttcgctgttgttccaagtgactgtccgtaagcaatatcatcatacacaagcacaagaccgtccgacggaacttcgttgtgctcaatctcacgggcaaaccatgccacttcctcttcaatcgtatctcttgtcacttcatggttctccacaacatcaaatccctgattttcaagccactgcatctgatattttctggaattctgaaagtccacgccttctgcacggacaagtgtaaatgcataaaatcttacatttctcttcgcagtgatctcattgttcagctgacggacagaaccgctgcagagatttcgtggattcttatatttcgcatctacatcctcaatctcttcattgatcttctcgaaatctttataggaaataactgcctctcctcgcagtacaagttctccctgatatgggatcttaagcggtacatttttaaatactttcgcattgtttgtaatgacctcaccgatcactccgtttcctctggtaactgccttcacaagttctccgttctgataggtcagaacaacagtaagtccatccagtttccaggagattaatgctttttgtccgcctaggaattccttcagtctttctacatctttcgttttgtccagagaaagcatcggacgctcatgacgttctttcgggagctcactgagtacttcatatccaacatttgccgtcggactgttcgccattcttgtaccaagcttttcttctaattccagcagttcatcatagagcttatcatactcgtagttgctcatgatttctgtattttcctgctcatacgaacgtctcgctctgtttagaagttctaccagctctcgcatgtgattcatttctttctgctcatctatcatcgcttcttccctttcccatgtctcgttctattatcttgtgctgctgcccactgttcctgatattttcctccgggcaatacagaagaatctttcagctgatcatataattcgttcaattcctgatctgtcagttttctatattgtccatccttcaatccatccaatgtaatgttcatcacacggacgcgtaaaagatccttcacttcatatccgagagcttcacacattctgcgaatctgacggtttaacccctgtgtcaggataatggaaaatgtatactttccaatctttttcacagtacacggacgggtcacagtatcaaggatcggaactcctactgccattttctttaagaaatcttccgtaatttctttatcaacagttactttatactctttctcatgtttattggctgcacgcatcattttattgatgatatcaccgttgttcgtcatcagaaggagtccatgagaatccttatcaagtcgtccgatataagtcacacgcactggataattcaggaaacggacaatgctgtccctctctctgcgttcttctgtacagacaatcccgcgcggcttattcactgccagcacgatcatctcgtcctgtttggaaacgactttatttccaactttcacaacctgtcccggcacgatacgcataccggtctgcgcacgctgtccatcaaccgtcacgcgtccagtctcaatgaggcggtctgcctcccttctggaacacacgcccgcctcgctcaaatatttattcagccttaccggctcactcttctgtaaaaattcttctttgattcgattactcaactgtaaacactccacttatattattgtctttgaaaaatgtatttccgctgtataaaaacagaacctctgagattctgtaggaatccataagatcattgatcgttccgctgtaatatctcggatccacaactacgatttctctgtagtacggtgtcaggaacggtataaatgaattcgcaaaggaatctttcacaagaagaagacgctttgtgcttgtagaaactgtacggatatcaagcaaggatgaatttcctccaagaaataccgtatattgatctttctcctttaatttagaagaatcatataaggatgtggaacgctttccttcatccacataatctatgatcaagtctgtatcttcttctgtcggcacataaatatcaatctgttccttctctcccagattcactccgctttttgacgccaacattccgttgaaactgctagaaactgcgtgggaaacatattttcctgaaaggtctccttcaatcccaagggatggtgccgtcgcctgaaatgcataaaatgcaccaagtgtcgtccagtgatgatccgttttgtaataaatcttctctgtcttatgtttattcaattccgttgacacgtcaatccactcaacgctatctccaagatcctttcgcaccatgctgaacatctgcgtctgatcttccggctttgccaatgctggaagtgaatgattcagcacatttgctgcatccggaacaagcatcatacgaaccggaatctttttctggctctctgaaaatgatttgattgccttgatatttgcagcaagatgattctcgtccgcaacttcaatctgctctaacagctgtccattcctgccgatgtagacaccattttccagacgacttccacaaatccggtctaccgtaactttcagctttctccacatatctcttccaacaaactgatcatccatataagcttcaaatttctcatcataatctccgcttatcagactgctcagacgaaactttggcttcgttgcaagcatacggttctcctgcactgatttttctttgttaggcactataatatttataataagaaatagaaacaagatcagaataaatataataccaaccaattgctcctgtacttttctctgtctatctttcttcatcttttcaccttaattgttgtcgttcactgttttctataactctctagaatctaaagtacaaaaacggattgtacgtatctgcgatcagataagcaactgatattgccagcattccaaagaaaacaatcagcgtaattacagtccgtactgtatgattctcagacacattcaaaattgcacgaagtagccttgatccaattgttgttgatccaattactgccagcaagtagaacagccagtgtgtcaggatcacaaagaatacttctttactggcaaatcctgctccgccaccaaccattgcaaaaaggtaacgaagtgctgctccaaggcttggactaaagaaaaatacccagccaaccagcaccagaactaatgcataaatatgctgcaatacactcggccaccgatccacgattgccccccagacatatttctccagtacgagaactactccataatagattccccatacaataaaattccatgcagctccgtgccacattccggtcagcatccagacaatcaaaaggtttacaatatttcttgaaatcgtcacatgatttccaccaagcggaatatatacgtattcacggaaccaggagctcaaagaaatgtgccatctgcgccagaattctgtaatacttttagaaatatacggcacatcaaagttcttcttaaactcaaaaccgaacattcttccaagtccgattgccatatctgaatagccgctgaaatcaaaataaatctggaatgcataagtaatacatccaagccatgccatcagaactgtcaggttacttgctgatgtcgatgagatttcttcaaaaatctttcccagcgtatttgcaagcactgctttcttcgaaagtccaataataaagagcatcgcgccctgtcccaactttcttccggagattttccttgcggtaagctgcttctcaatatctccataacagacgattggtccggcaaccagctgcggaaacatggatacatacagcgcatacttcaccagactctgctgtgcttttaccttgcctcgatatacatctacaatataggaaatttcctgaaatgtgtaaaaagaaattccaattggtaatgccagttccctgtacggaatactgattccgaacaacgtattcgtactttctaccaaaaatccaaaatatttaaagaacacaagcagcacaatatttactgttattgcaaagaccagtgaccgctttgctttcgcctcattctcactcttattctcaatatccattccgcaaaaatagtttaacaaaatactgagtatcatcagaatgatataaaccggttcaccccaggcatagaaaatcagactgcctgcaagcagcaggagattcttccattgcggcggtacaatataataaactgccagcatgatcggcagaaataaaaacaaaaatgtaatactactaaataacatctgctcccccttctacagactcttgtcaaatgcgctgcgatattcagaagctttcgaagatactgcaaaaaagatatatcttccacgaatactttcctgtgaatcctctaaaagcttcacctgttccggcaggtaagaatcaaaatcttctattctctgtgcttttctctgtgcgatcgcatttgtcacattttctatctgtgcatcatttttcacctgtatcaccagaacttccgctgctgaaatactggacggagaagaataatacaaaacacccttgtagtccgcactgttcagtccataatttctcttgagcatctggtcatccatctgcacaagttctttactgtccaatacactgctcagagcctttgatacttctgaaaaagcccgcttacttccacttgcatatagcatcaatatcacaagatatcccacgataattactaaaagtatatatttcatcgcagagatcattcgctgtcttttctctgtcatagcgttgccacctccgccatcttttctgcccagattggatagaaattcgccttaaaatgaattccatcttcttcatagtactcatcttctataatatctgaattatcaatgtatccgatctgcttcttttcacacatcgcttctagtttttcattgtaatctgcgatatttgcaagtgccggctccttctctaccgcactttcctgcaccggaaaaacagcattcacaaaaatgtgcgcatccggcatagccttctgaatcttcttaatcacatctgaataatccttgataaacttgtctacatctccgtttgtcttagttacatcattcatcccatatgccagaaaaacaatctgcggatccagttgttttgcctgctcgatctgatcatccagttcgctgaaatgaattccaattttcgcaacaacacttgatgtattcagtacatcatactctgtaaagctcgccgcaatggaatcgcccatcacaacagcaccggaaaagcgttccttcatacttcttgtatcggatgaatctcctgttccatctttcttttccaactgattaatcttctgctcaatcgtcttcgcatctgcagattctttgccttttatatatgcaattccttcactggtgtcgactggcttctttgtcagattgctaacaccctgcactgccaggagtatcactgtaatgaccagcgcacatccgaccccgatccggattcccagtttttgctttctttttattgttttcttcatatatctatattctttctgttttttatatactgtatagaatcccatactgttttaatagtacattttttagcaataaaagtcaacaaatctgcgcttgtatctcgccattccttttagtacaatgataggtagacgattaagaacttaaacagctgcggaggtatctgatttctatgatttcactgactttaacaaatgtaaaaaacttcatgtctcaccttctgttaaaagagacatttgacaatttctcttttattgaaggagagattattacgtttaatacctttcggattgacgggtatatacagaaagatttctttgattccgaagaagagattccggaatattctctttggaaaaatctgcgtgaattttgtttttccttaattaagggaaagaaaacaccgctcggttttcattttgtcttcagcctgaattcaaagaatatttcccgtctgatcgaacagaaagaactgggacttaatcctgccgatgtgcagggactatatttgaatatacgttacgatggaactcatctcacctgcgtaaccggaacttccttcaagagttttatgatggataagaccctggaacgcgaatgggatgagatggtaaagaagttctttttaaaaaaagagattgaatttgagttgatgtaaattttaaaatctattagcaatgtatgccgcaaggcgcacataataacagccgcctcacggtcaaataatcgtgaagcggctgttattattaccataaatgatgagaaactcatggaacgtgtttctcatcattctactttattattttgtcagaagcatcataatatcattgcttctcttaacgaatgctgtcatctcttccggacttaatggcttatgagcaagcattgcaagatcatacagctgtttgcagatgattgacacgttctcgctgtctttgttcgttacaaggaactgaacaagtggatggttagcattgagtaccagtgttacctggcttccgaacatggatgcatccatgcctcccataccatacatcttcatcatctcctgcattcttctgttttcctcagaaagaactgccatagatgctacattctcatctttgagcttttcaactttaacatcaagcttctcattgccaagctctttgcggaagatttcaacaaggctgtctgttgtcttctggaattcttccttctcatcttctgcaacttcatccttcagagaatcatgtacatctgcatcaattctcaagaactgaacttcctgatgtttctgctcaaggtatgtgataaatgcagaatcaatgttatgtgtcagaataatcgcatcctgcccctgggccttgaacatgttgatatactggctctgctgcacttcgtctgtcacatagaagattcttgtcttctcttcttccttcgcatctgtgtccttagactcttctgcgtctgtttttgtttcttcttccttagtttcctctgtcttggctgcgtcagcttcttcgcctttggcttctttgatgatatcttcgagagtcatgtatttatgatcaagattcttgtaaagcatagaattcttcattttctcgccgaatttctcatctttcagacagccgaacttgataaatggactgatgtcatcccaatatttctcgtagttttcacggtctgtcttgaacattccgttcaacttgtcagcaaccttcttggaaatgtaatcagcaactttatttacaaatccgtcgttctgcagtgcactacgtgatacgttcaacggcagatctggacagtcgatcactcccttaagtaccataaggaactctgggattacttctttaatattatctgcgataaatacctggttattgtaaagtttaatctttccttcaatggaatcatactctgtattgatcttcgggaagtacagaattccctttaagttaaatggataatccatgttcaggtgaatccagaacagtggctctttgtaatccatgaacaccttgcggtaaaaatcaatatagtcatcctttgtacactcgcttgggttctttgtccacagcggatgtgtatcactgatagataccggacgtcttacgatcttcgctttctgcttcggctcgccctcttcgccttcctttggttcctctgtaatatgctctactacagtatctgtatcaagaacatctgcctcatcgattgtatcgtactccggctctgcatttgccttggagaggaagatctctaccggcatgaaagagcaatatctctcaagtacttctcttgcacggtattcatttgcaaactcaaggctgtcctcattcagatacagtgtgatctctgttccgactgttgtcttatttccttcctgcatctcatactcagtgccgccttcgcttgcccagtgtaccggtttcgcaccttctttataggaaagagtatcaatctgaacttcgtcagctaccatgaatgctgagtagaatccaagaccgaagtgtccgatcatatcatcttctgttgtcttgtctttatatttctcaaggaactgtgtcgcacctgaaaatgcgatctgagtgatatactcctctacttcttctgctgtcataccaagtccgttatcgataaacttcattgtcttctcttctggattgacaattacttcgatcttcggtttgtatccttccggaagttcatattctcccatcatatccagctttttcagctttgtgatcgcatcacatccgttggatacgagttcacgtacaaagatatcatgatcggaataaacccatttcttgataataggaaaaatgttttcgctgtcaattgataaagtaccttttttaactgccattttactgcactcctttttatttataatctatccgtaactgctcagttacgtttcttttaatatcggctgtcaatcaactttttcgctgatatcgatagtatatttgcctgcctaatggacattctagtacagcaaaatttaaaagtcaatagaaaattagcactcctttcaaaagagtgctaataattccattaaaagtataaagtttttatgaactatactgtctccggctccggataatcctctccgaatgtctcaacagtaactttcttcattacctgtttctcaagcgggcggtcgctgtagtctgttgctgtctcagcaatcttattcactacatccattccttctgtgatcttaccgaatgcagcataagctccgtcaagatgtggcgctttcttgtgcatgataaagaactggcttcctgctgaatccggatgcattgcacgtgccatagaaagaactcctgcatcatgtacaaggttgttctctacaccgttctgcgcgaactcacctttgattgagtatcccgggccacccattcctgttccgtccggatctccgccctggatcatgaaaccgctgatcacgcggtggaagatcactccgtcatagaagcctttctttacaagtgacacaaagttgttcactgtgttcggtgctacttccggatacagttctgctctcatgatatcgccattttccatttcgaatgtaactactggatttgccatgtttaattcctcttttcttctataataatcgttcgcagttttctatacactgtgaatagtcttattgtagcggatttatttcataacttcaaccatcattcttcctcatatggttgaaatgtacactttcccctcctttttttagtcactcgtgacattgttgattttcgtgcctaacgctatactaagtacataagttaaacaaaccaaaatcaactaccaattaaaaaacaaaaccaaatttagtcaaacaagtaaaaagtaatcatttaaggaggcacttataatggcaagtttatctcttcagggaattcagaaaatttatcctaacggatttcacgcagtaaaagatttcaatcttgaaatcgctgacaaggagttcatcatcttcgtaggaccatcaggatgtggtaaatctacaacacttcgtatgatcgctggtctggaggatatctccggcggtacattcaagattgacggaaaggtaatgaacgacgtagagccaaaagaccgtgatatcgcaatggtattccagaactacgctctgtatccacatatgacagtatatgataacatggctttcggattgaaacttcgtaaagttccgaaagatgagattgataagaaggttcgtgaggctgctaagatccttgatcttgagaaactgctcgaccgtaaaccgaaggccctttccggtggacagagacagcgtgttgctatgggacgtgctatcgttcgtaatcctaaggtattccttatggatgagccactttccaacctggatgctaaactgagagttcagatgcgtatcgagatttccaagcttcatgagaatctgggtgctacaatcatctacgtaacacatgaccagacagaggctatgacacttggaacaagaatcgttgttatgaaagacggagttgttcagcaggtagatacaccacaggcactttacaatacaccatgcaacctgttcgtagcaggattcatcggatcacctcagatgaacttcatggatgcaaaatgtacaattaagggaaatgatgttactcttacagttggaaaacatgttcttaaggtaccggcttctaagaagcaggcactgatcgatggcggatatgatggaaagacagttgttcttggtattcgtccggaagatgtacatgattcacaggcgttcatcagcaactctcctgacagcgtaattgagtctacaatcaaagtttacgagctgcttggagcagaagtattcctgtacttcgatgttgagggaactcagatgacagcacgtgttaacccacgtacaacactcagaactggagatcatgctgtatttgcacttgatatggaaaaaattcatctctttgacaaagacacagagttgactattacaaactaatcctttacaattaaactaaacacggagggggctgtacttttctcggaaggtgcagcctttcttccatctattattattttatttacggagattactatggctaatacatccgaacttgaaaaaggactcaatgaattaaaacgtttgaccggaatcacacttgcagtgactgccgaagattctgaacaggagcagatagctctggaacagattcgctgtctctgccttgcctaccgggaaaaatataataaaaatgattttcttatgggactgatgaccggcggtgttccttcctatgatgtacagcagcgtgccgcacggctccacattgcaccggaagaaaatcgaattctctttttgattgaaataaaggaacctgatgagatcattggagagatccttaaaaatctgtttccttctcaaacaaaagcttatattgttcctgtttcaaaagagcgactggctgtattatatccatttcatgagacaaaggattccaaagattctgctgatgaacatgcaagacatctggctcatgcgattgttgacacgctgaatgcggaagctcttgcacatgttcaggtttcttttagtcagatgattccttctcttttggaattatccggggcttttcgtgaagcaagtcttgcactgaaagtcggaaaacttttctatccggagcagactgtctttccatacaatgaactggggattggccgcctgatttatcagcttcctgtttctctgtgcgaaagctttctccaggaagttttcttagacaagattccggacaagctggacgatgagacactcctgacgatcaaccgtttccttcagaataatctgaacattgctgagacttcacgccagctccatatgcaccgcaacacgctgatctatcgtctggaacagattgaaaagcgtaccggacttgacttaaggcaattcgaagatgcaatgacatttaagattgcaacaatggtcataaactatcttcatgctgaaaaagaaaaaaattgcactgagatgtaattgatatataatgtgtaactgttcagagccaagcaaaatttcataaaacaggtgtaaaatgcttgcatttttaagactatttttgaaattttatttggcggatacgccacaccgacgaaatgcgtagcattttggaggttgactctgaacagttactataatatataatatataagaaaggacttataacttatgaatgacgcattatgtgaacatattgtagccagaaaatcaaaaccaatggattttgttatccgtattcttattattgttgtgatcgttgcaatcgcaatcggaggaatgccgtttcttggattctttgcttttgctcttgctgctatcatagctttacttgcctattattttgcatttccacttctgaatgtggagtatgaatattcccttctgaaccacgatctggagattgatgcaatttacagcaaagagaaaagaaaatccaaaatgaatctggatattcagaatgccgagattattgcaccaaaaggatctcaccgactggattcttatcatccggaaacaacttgcgacttttcatccggaaatgcaaatgcaaagattttcgcaatcatgattccgatcaatcagaaaatgacttgtgtttatattgaacctgatgaaaagatgattgaacatatgaaacaatggatgggaatgaagatgttcgtagattaatattgaatgtttgtttctaactcagacaagtaccacaatcagcagctactaattgcggtacttgtttttttctgtctgattatagattacgaattgcaatcacatacccggcagggcatcataatcttatttttcagcaatatccgctatatatttacatgcggcaagtgcagctactgcaccgtccgctgccgctgttgtaagctgacgtacttcttttgtccggcagtctcctgctgcatagattcccgtttctgacgtcttgcaatcttctccggcaacaataaatccaccctcatctaactgaacaacatcagcaaatttttcattctgtgcaatctgtccgacagctacaaaaattccggaaacagcaagttctgattcttctcctgttactttattcaaaacccgcagactttccaccatctgctctccccggatttcctgaacagttgtatttaagataaactctacattttctttctcttgcaaacgttttacaatctgatcttctccccggaattcgtctcttctgtgaatcagataaactttactacagtaatttgacagaaattctgcatcctggagtgctgtacttccacctccgacaactgcaacttctcttccccggaaaaacattccatcacaagtcgcacagtatgaaactcctgcacctgtcagacgttcctctcccggaactccaagatggcggtgtgtcacaccagtggcaagaataatgcttttgcattcatattctttttccgttgttacaatcactttataatccgcttcttcacggatacctgtcacctgctccattatggtctgtgttcccagctttactgcctgatccatcagattcatagagaattcactgccactcacacttgcaattcccggataattttctacattcggagaagatgtgatctgaccaccgaaggttgttccctcgaagagtacggtctgctttcctgcacgctggccatagatagccgcagtcatccctgcagttccgccaccgatgattccaatatcataaattcccatatttttcctttcccaacaaactgtttctacattttctgattgctgtaattcattttttcatttacgctaaactgtaatatgtttcaatcacttcttacatatttctggacatatctgcgcagactttctctgcctcgatcactgcgcttctaagtccaaatttctcaagtacacgtactgcctcaatcgttgttcctgccggtgaacataccatatctttcagttctcccggatgctttcctgtctcgagtaccatctttgcacttccaagtactgcctgtgctgcgaactgatatgcctgtgatctaggcattccctcagctaccgctccgtctgccattgcctcgatcatcataaagatatatgccggtgaacttccgctgactgcaacaactgcatcgatcaaatgctccggcacgatttctactttaccaaaagaactaagaagctccagtgcatagttcttttcttcttctgtcactgcatcattcgggcatgccgctgtcattccctctccaactaatgctggtgtattcggcattgttcttacaatcttaactttctttccaaactgctcttcgagccatgcgagagtcttgcccggtgcgattgtaataatcagctggtcttctcttactgtatctttgatctcagcaattgtctgtgcgtagaattgtggttttacagagagaactaatacttctgctttctgtgttacttctatattatctgctgtcacatgaattccatgctcttttttcgcacgttcacgtcctgcttccataatatctgaaccaatgatctcttccggggcaataattccctttttgatgattccgcccatgattgctcctgccatatttcctgttccgataaatcctaatttcatgatcttaagtctccttttcttttaccattactgttctaagaaccgtgtccagtaaccttttatctacatgtatccgtctctcacccagaattttttctcatcctctaatggaatttcttctgtgtccatccagtcgattgtaataaactgattcctgttcagcccttttagcagttcattgatcagccattcccgtccctgaacttccattgtaacggttccatcccattcgttctgaacccagccaaccagatttagtgaattcgccagatatttcgctgtatagcggaatccaacaccctgtacacgaccgtgaaaaacaatgtgctttctaacttctgccatatctgatcactcccttgaagcaatttatgttgtacactaccgttattctaacatatttttttaccttgtacagttcttttcggtaaacagtccctgcttcctgtgttataatgggaataacttttttgaaggagggcttcgagaacgaatgagtaattatgaaacatcacagacttctgatctgaaagaattgataaataaattacgagatacacagactctctctaaaaatgaatggattcggctaattgacggaagaacccctgaacttgccgactatttatttgaaaatgcgcgcaaagtacgaatcactcactatggacataatgtttatgtccgcggactaattgaattcactaactattgtcgtaacgattgttattactgcggtatccgcaaaagtaatctgaatgcacatcgctaccgtcttaccaaagaagagattcttaactgttgcaaaaccggatatgaacttggttttcgcaccttcgttcttcaaggtggtgaagatggctggttcacggttccgcgtctggctgatattgtctctgacatccacaaaaactggccggactgtgcaatcacactttcagttggagaaatggaacatgatgcataccagactttattcgatgccggcgctgaccgctatttacttcgccatgaaacttataatgatgcacattaccgtaagcttcatcctgcttccttaagtgcgcgtcaccgtcaaaactgtctgtgggatttaaagtctatcggctatcagattggaaccggattcatggtcggtgcacctttccagacaactgagaatcttgcagatgatatgcttttcttaaaagatttgaatccgcatatggttgggattggtccttttatccctcaccacgatacacagttcgctagtgaacctgccggaacactggaattgacactttatctgctcgggctgatccgtcttatgctgccgaaagtacttctcccggcaacaaccgccctcggtacgatttctccaaccggaagggaacagggaattctcgcaggagctaatgtcgttatgccaaacctttctccaacagaagttcgcaaagattatctgctttatgataacaagatctgcaccggtgatgaatcggcacagtgcaagaactgcctggcccaaagaatggagtctgtcggatatcatgttgttgtagaccggggagattccttgaataagtaaaaaggaggttactgttcactcccgtgtcaatcacttcgctgattgacacggaggatgcatgttttggcttgaatgcatctcgccccatcgccaaaggcgatttaaaatggcgagatgcgttgctggtcgcacattgtgtgaacagtaacaaaaagagtccatggtatgcgacatatcgcatttccatggactccttttctattcacacctcgcctcacagcgcagtgtcattttttcattttctctactagctataagaattactctacaacagctaagatctcgatctcaacgagaacagccttcggaagatccttaactgctacgcatgaacgagctggtttgcttgtgaagtatttctcgtatactccgttgaatgctccgaaatcagcgatatctgcaaggaagcatgttgtctttacgacattgtcaaagcttgatccagcttcttcgagaacagcagcgatgttagcgataacctgctctgtctgtccttcgattgttgtggcatctacatcacctgtagccgggttgatcgggatctggcctgaagcgtataacattccgttaactacctttgcctgagaatatggtccgattgcagctggtgcctttggtgttgaaattgttttcattgaattctacctcctgatttattgaaattataagttcttaatgaaattatataacgttaaaatcgtttagtcaataaaatttcattcacttaactatttttcattgacttctttttcacacaaaccagcatatccatgataaaataaaaccatcaatatactatttgtctgttttgaccgaacaaaactggatatctttcacacagacagaaaggacgcatgattatgccaaccggaaatttaaaattaacttcacttgacaaaaagattctgcactcatactgtcagacactcgatggactttccaattatcttggaaatggatacgagattgtccttcacagtctggaagattatgaacactctgcaatcaaggtcatcaacggatatcacacaggacgtaccgaaggtgcaccgattaccgaccttgcgttgaagatgctcgagcagatccgtcgaaatgaagaaaatgaccatggtgttatttatttttccacaaatgtaaaaggagaaccgctgaagtcaactacaattcctgtcaaaggagagaaggacagaattatcggactgctctgtatcaacttttatatgaatacaacaatggcagatttcttctgcaactttgctgttccgattccatctgattctgacggtctcacactctccggtcagattcatgagacattttcccagagcagttctgatcttcttgagcagaccattcaaaccgttcgtcaagaagtgttgatggattcagcaatatcgagcacaaataagaataaagaaatcattttccgactttaccagcagggaatctttaatctaaaggatgccgtcgtcacgattgccgaagcgctgggaatcagtaagaataccgtatatctgcatctgcgcaatcttgagaaagtaaataattagcactatctgatatgcaaaacattactgtttacgcagtgaaaaggacaagacactttcattttatctaacatttcattcgaaagtatcctgtccttttttcatcctttattttccagccggcatatatctcagaagttctcctgccacgctggagattggcattgtctgaagccatacatgtccaggtccggtgacaactgtattgaacacaccttcaccgccgaataccatattcttaagtcccggtactgtctgaatctccatactgcaagttgcatccattgctgcaagatatccagtatccactacaatctgttgtcccggtctcagttcatactctaccacatgtccatcaaattcaagaaatgctattccatttcccgaaagtctctgcatgataaacccttctccgccgaagaatcctgctccgaatttcttttggaagaaaatagaaagatcaacaccttcttctgaagcgagaaatcctgacttctgtacgatcaactcctgtcccggtgcaatctggcgtgctacaatctgtcccggaaaactggatgcgaatgcgatcatcccattacctcccgttgctgtataacggttctggaacagtgcctcacctgaaaacattcttccaaatgcttttccgattcctccgttggaagtcgtctccattttcatattcggagacatccaactcatagaaccgcgttctgtaatcattctttctccattctccagatagcagaccactaccggaagggtgtcacctttgatttcatatctcatggtttattcctcctaaatcattcttcctaacatattctgtaaagttccatctgttctaagaatactattcttttacaacattttccagtccctaatcttcttttttctcgctcatctccaatttaggaagtatgatctccgccttgaacaggtctgcttctgttgtaatttttaaattaccatgctgcagctgtgcaaagctcttggcaattgccaggccaagtccagagccttcagtatttcttgaagaatctcctcttacaaaacggtccgtgatctcctctgtattgaaattcaattcccctgcggaaacatttttcataaaaatctgcacgtcatccggccgctcattcatttctatataaactctcgtatgcggcattgcgtattttgtaatattaacaatcaagttctcaaaaattcgatatgttttttcactatccagccagagaactactttgtcctccggaagtttccaacggaattccagacgtgcttctctaatcttttcctcattctcaagctccgcctgacggatcagtcctacgagatccactttcatgtaattcatctggatagtcttacttgctgccttactcatctcaaagagatcctcgatcagggctttcagacgaagagattttctctcaagtacttctgtatattcttttctcttttcttcgtctttttcattctttaaaaggtcaatgtaagtgatgatcgcggtcagcggagtacggagatcatgagagacatttgtcacaagctctgtcttcatacgctcatttttcacttcttcatccaccgccttcttgaatccgctctgaatcttctttaattcatcctgaatcggacggaagattccgacatcaccttcgattggaagatctagctgtccttctgcaagctgatttgttgatttaagcagaagctgatatttcttcttgattccatttagcactttcttcattacaaagaataaaatgatagaataaacaattaatggtatcagtcctatgctgtaagaaaataatttcactactaagagcagaagaaaattcaggatcacgattctgaggatccctttatttcctttatcccgcagatccatctgaagaattgcttcatattgatgatgcaaaaatgctttcatatctttccatgcttttttcaataaatgtctcttttcatgtacttctccacgattttcctttccccaacggatcagcattcctactattgtgtgttcttcccagtaatttcttccctctgtaaatataagtcgaagactctctgccacacagaagaaaactcccagcaggcagaaccagatacaccagttgattcccagcatactgattgtattccacataatatttcctgacgggtgatagttctcaaaagaccagtatactaaacctgcaaatgcatcatagcctatacccaatgcagaaatccccagaatcactgcaagttcgaatggcatacggaataattttccttcgtatcttccaactttcggaatacatggaagaagtaatgctgcaagcaaagctcctaaaaagaagagtgcagcggaactccagaacatggaataattataatccacatactcgtcttcctcctgatttgcagaaatgaattcatcataatttgcatctgtcatcccataaacgatactgattccatctgtctgctcttcatcgtcaatctgatcctcaagatctgcatccatacaataataagacagatctttctccacatcgtacgcttcttccggtgacagtttcgtaccgctaactgttacatttgacattgttccggatgtgccatacttatattcgattttgagaacataagaattatctgacttcaaagcctcgtttgtctggtcgtcatttccttcaagcaagggattcccttctttgtcaaagatctgataatccatatattttttaaaaagagagaatgcactgtctgacattaattccatctgttccgatgcatccatcgcatctgtgacctcgctatagagaaggcgatttcctgtcgcaagggaatagtccattcgctcaatacactcttcaacatcatcttctactgtaaatgttgatgcgatatcttttcttaccacataataactttccacaacacctgctgcgaataagctaagaattactatcgttataattgttcttatcttacggttgcttttcaagtttgtatccaactccccacaccacctttaaatattttggtttcttcggatcgatttcaatcttctcccgaatatttcttacgtgtaccatgatcgtatctgtattaattgccttttcctgccatactctttcgtaaatctcttcggatgaaaagactcttcccggattctttgccaaaagaagcagaatcttgtattcgatcggagttaatttcaccggattgccatccattgtgacttctaccgtatcctcattgatctcaagtcctccgatcacatgtacattctcctgtggtacgagcttctccagaaatctgcggtaacgtctcagctgagaatttacacgggccatcagttccatcggtgtaaacggctttgtcacataatcatccgctccgatgttgagccctgtgatcttatcaacttcctctgattttgcagacaacatgattacaggaaaatcgtatttctcgcgcaacttcatcgtcatacgaatcccatccatacgtggcatcatgatgtcaatgattgccagatggatttcttccttctcaaggacttctaatccttcgatgccgtctgctgcctgaaacaccttatatccctgactctgcagataaatctgtacaccttctctgatctctttatcatcctctacaattaatacgtgattgatctccattttgtttcctcctaaaaaaatgacctcctttatatatctacagaatactctgtaaatctaaaggaggcttttatatgtttcaaaagattttcttaagcttactatagcttttttaaaaatattggtcttttagttctctgcattctgctctctgaagaaaatctgacccgtagaagcgtccattccatccacaattgccagtgactccagctggaatccaagattacggatgattcttccgcctgactggaatcctttctcaattgcaattccgataccttctactgtagctcctgaagactgaacgatctgaatcagtccctgcagtgcacatccgttcgcaagaaaatcatcaataataagtacatgatcatcttctgaaaggaacttctgtgaaacgatcacattattcttacacttatgtgtgaaagattcaacctctgctacatacatctcgccgtctaaattgatgctctgggacttctttgcaaatacgaccggtacatcaaagtgttctgctacgatacaggcgattcctataccggaagcttctattgtaagaatcttattgatgttcttgtcagcaaatctcttcttgaattctgcacccatctgattcaaaagtttaatgtccatctgatgattcaggaaactgtcaaccttgagaacattgccctcttttacaataccgtcttttacaattctttcttccaaaaaattcatctttctacctcttcctctgtaatttccccaaaatgtgttactgctcagtgtaaccccaaaaatatttcttaaagtatagcacaactccatataagaaacaacgttaacaggacgaaaaaatagtacaaaaataattgaaaaaaagcactttccttatccggtttatcaaaaccgaatctatggaaaatgcttcgcgctatttctgtacaactttgattctgccctccaaaatcagggcaacaaaaaagcgggtgatgggaatcgaacccacgtatccagcttggaaggctggtgttctaccattgaactacacccgcatttcgtgtcttatctctgacacgagtagtatcttatcatactctttttaaatatgcaagtacttttttaaattttcttatattttttattttcccatctcctgcagtgcacggataaattccagatcttctgcacgaagcttcagatttgtctcgtaatgagctccgttcggtgctgtcacattgatctcgatgattgtgccttcctcaactgcattctgagctactgctcctaagaacattggaaacttcggatgatttctgcgaaatgtatccatatgtccttttaattcctgtatctttccaagctgtgaaaaattcatattaactttcctttctgccctgacgacttttaccttatttttattatgatacctacggattgctccattgctatgcaattcccgcaatcctcgaacacctcaaactcccataaaatggcgtattcacaccattttattccgttttcggtgttcggcgtgtcaataagtataaattgcttatttgtgcaagcacaaacgcaatttatacttttgacacttacatcataatatacgaatctgataaaaaatacaacttttttgacttattttccacttcgttatataataggaaaagtgaccgatgtccccctttttactaaattatttcaaccagcaaggacagacatcccggacttcggttttcagattagagaaaagaggtaacatccatgagcaagagaacagataagaaaagacagaaaagatttaatgaggtacatccgattaccacagcaccagctgctcagcctgtagtagagacagctgcaccaacagctgaacctgttccggaagtgactgtaacagaaacaactgcaccagtaaatgctgctccggcatatgatcttttcatccagtatcagaacggcgaatatgacgctgctgtacttgcagagaagattcttgataaatgcaaagctgaagatatggacagctccgaccttaagatctatgtaaaacctgaggataagaaagcttactatgcttgtgccggcggaacaggtgctattgagttagcttagactgatagaaagaaagtctgtgaaagaatctatctactcttaagattcttttcacagactttttattttgactgttataccctgatctttttactatactccgacctttttacaaacatctgccaaacagcatctgtcgcaatacggtttcgttctcgcagtacatatctctcttccatgataaacaagacggtggcaaaggtcacttccttcttccggcggaatgatcttccacaatgccatctccaccttcttcggctctttaattccatctaccagaccgatccggtttgtcaggcggatacagtgtgtatctgtcacaattgccggctttccaaacacatctcccatgatcagattcgcgctctttcttccgactcccggaagctttaacaaggcatcaaaatcatcaggaacctttccaccatattcatcccgaagcatcttcatacaggcactgatatctctcgccttactctttccaagaccacaaggacgtacaatcgcttcaatatcttccaccggagcttctgccagtgcttctactgttggatatttctcataaagaccttccacgactacatttactcttgcatctgtgcactgtgctgccagccttacactgaccagcagcttccatgcctgatcataatcaagcgtgcatcctgcatccggatactctttcttcagtctttcaatcacttcaagcgcacgctgtttctttgtcatttatttcacctcggcatttttctttaattcttccatcgcattcttgaacttgtctgatactgctgtagggtttcttcgcagctgtctcatagcatttacataatttctgtctgtacgtgagcctaatttctgtctctcacttaatatattggaacgcatctgggcaagttcttttctccagtttcctttcgattcagactcttgtgcttcattctccagtcggacagtacgaagcagtgcctcaaccttctctgaaagctgtgtaagctgttcttttcgttctctacgctgttcttctatcttcgcaagatacaattcttttcttgtctgcttctccgctgctttcatctctttacgctcttcatacaacagatagctgtcctcaagtctctcctgtaccccttcagatgcacgtttcagccgttcctgaacaccttctgatgcatctttcagtctgtcctgcatttcctcagaagcatctttcaggcgctcctgcatcttctggatctgttctttgctggcttcaagctgtacaaggatacgtttcatatccatagcctcgttgaaggactgtgtgaagtcaactgctgctgcgattgtcagaacaaatgcaaggatatcggctattgtaaccggaatcaacaataccatatgttcaaatggaatatgtacgacctttaccataagaatggagaatgctccccagcacaagcttgccagtggacaaatgtatcctctgacattaaatttcaggtttctataatcccagtaccttacgtggaacagacgctccatcgtaattcctgtaaaatactccaggattgtcgcaccgatcattcccataagaaagacaagcaggatgttatctctgaccggaatcgtcacgatcagaacaaccattgctccggaaccatagagcggaagcatcggaccatgcataaatccacggttcacccaacggtgctttctgacagaaacataacagctttcccagatccatcccagaaaactgtagagaaaaaagaataaaacccattgtgataaatcgtattcctgcatttttcttccccttttttaaaagacttccgcgctctgataaaatgtaacgcagaagtctctttcttgaaatcgtttagtttctctcctcgatctccatcagcagatctactctgcgctgatgacggccgccttcgaattctgtattgatccatgtatcaacgatcatctttgcaagttctccacctactacacgagctccaaatgcaagtacattacagtcattatgtgctcttgacatcttcgctgtaaatggctcgctgcagacacatgcgcggattccttttactttattcgctgcaagagagattccaagtcctgttccgcagatcaaaatccccttctctacttctcctgctacgactgcacgggccactttctctccatacaccggatagtcacagctgtctgttgtatatgttccataatctacaacctcatgacctttctctttcagaaattctatgatttctgctttcagctccagtgcggagtgatcgttaccaataccaattttcattttaacgttccatcctttctaaatttcaaatatcaagaatgcctcagcattcttgctgcgaggtgcgcgtcatgcgaatacaggacatatttctcctgcgcacctctgcaatcctgccagaggctatgtcagatgggagtttatctcacatctgatataccgtctttatcataccaaacttgtacggtcttgtaaactcacaccggatttgtttctaatgtaatacaaaatgttgctgttcaggattcccgctttgcctgacaacaaaaagagaagcataaacagcttctctttttccttctgtaaaccatcgctatgataattttcttctgttatgcacgtaatccgttcactttatatcttagaataatgaattgaaacgctccattgcttcttttgtcttctcatgttttccaaaggatgtcagacggaaataattctttccattttctccaaatcctgctcccggtgttccgacaacctgagcattttcaaggagataatcaaagaactcccaggactccattcccttcgggcactcgaaccagatgtatggtgagttcacgccgcctgtaaatgagattcctttcttctcaagtgtttcagcaatcatacgcgcattttcacgataatatccgatattctcctgacactctttcatgccctcttctgtgaataccttagctccggcatactgaatgatatacggtgttccgttgaactttgtacactgtcttctgttccacatattgtgcaggctcaatgttccgccatttgatgtctcaaacacaagttcttccggaacaactgtataggagaaacgtgtacctgtgaatcctgctgtcttagaaagggaacagaactcgattgcacatttctttgcgccctcgatcgcatagatgcttcttggaagtgtaggatctgtgataaatgcttcgtatgcggaatcatacaggatcaccgcatcatttttcagtgcataggcaacccatgcctctaactgctctttattatagcatgctcctgtcgggttgttcggagaacacagataaatgatatctgcctttacattttcatccggcattggaaggaaatcgttttcttttgttccgttcatatagataatattctttccgtccattgtatttgtatctacataaacagggtaaaccggatccggaacgagaaccacgttatcctttgcaaaaagctctgtaatatttcctgtatcactctttgcgccatctgaaataaagatatctgtagcttttacttctacgccattgcgtgcgtaataatctgcgattgcttcctgtgcaaatgcatatccctgctccggtccgtatcctttgaatgtctcagatactgcctgagaatctactgcttcatgaagtgcctcgatcacactctttgtcaatggcaatgttacatcaccgattccgagacggataatatccgccgctttctccggatgtgtttcctcatatacttttactcttcttgcgatctctgcaaaaagataactgtcttttacattctgataattttcatttaactttggcatctttgtcaaactcctttcccagctgctttcatgctgttcacagtattctgcaaccaataactctagtattcctatgtgttatattaacagattttttttcattcgaaaagaagttgaaaaaaagaaacaagattttgtaaaatcttgtttctttgataataatttcagcactttaactgtgcaaattgatgatgcaataaagagcatttttcttttttctttcttacaaaagccagatgatcagcaagattacctccacaacaaagatcacaggcactgtaatcataaattttgctttccgtatcttatgccggaagcacatcatacctgcgattgctcctgcacttccaccgatcagtgcaaggattaacagcgttttctccggaacccgccatgcgcctttcttcgctttccatttatcaatcccataggtacaaaatgcaaataaattgataaatatcagataataccagaaatatttcataagatgatctcctccttcaaggcaaaggaatagatgatcttctccttcaccggcttctctaacagttgctccaacgcctgggcatagtaatcaagctgtgcatggtacagttctttcaattgagatgcatttctgactctatccgtcttatagtccagtagtacaagcccgtcttcctcctcgaaccagacatcaataattccctggatgagaatggtctcttcctttcgattttcatccgcttcctgacttctcttctgaatgtcctgataaatctccggatagatttctgatgcagctactccgagaacaaatggctgttccttccgaagctttccatttcctgctgcttgtgtcattcgtcttccactctcgctatttaaaaacgcaagaatatctttcgtacggatacagtctgccatctcttttgacagtctccctgcctgatagaacagttcgatttcttctttcagaagttcctctgtatactcttttgaaaaatcatgaagctcgagaaatttatgataagcacttccccttgaagctcctgtcagtccttctttctgttcttccatgaaatgcggaagcagtggcacaatctccggctcctgaatcaattcttctcctgcttcttcctgcaaagactcacgcttcttcaactctgaaactgtaaatttcagcttcatttttccttcttctttatatggatacaggaaattcatctgctgttccagcttatcttccgctcccggaagataaaccttcgttgtatcccagtgttcaagcacttctcttgcgatcacttctgcctgtcgctgtgcatcttctgtaaaatccatctctcctgcatcaaaaatccggactttaatcggcaattgctgcacctcttcactttctgttttgagaattccacacaaaccatcttctctcttgagatcttctgcctgaagaagtgccggaagaatccagtccagataacggtttgcaccttctaactgataaaggctcaatggagattccctgtctgtcatatgattcacataaggctccagaccgtcttctcccattttcagactgcctgtcagaatcagcttttcctttgctcttgtcatcgctacataaaacacacggagttcttctgcaagattctcaagctttgtcttctcctggatcattttcttcaaaaaagtcggtgcctttgtcctcatctcaagatctacaacgtcaattccaactccgtttctcggatggatcacaatacttcctttcagatcctgtgtattgaattgcttacctgttccggctacaaaaacgattggaaactccagacctttacttttatgaatactcataatacggactgtgtcatcctgttcgtctatgatacttgcttcgccataatcaacatcatattttttcagttgctcgatatagcgtacgaaattaaacagacctttataactcgtcccttcaaatgctcttgctttctcaacaagcatttctacattagcctgtctctgtgcgccccctggcatcgcactgataaataacccatagccggttttatcaattatttccgcaagaaggtcatggattgccgtatacggaagaatttccctgaaatgatccaatacctcgaaaaacttcctcaatttttcctgtacctgtattgcctgctttttgtccacagtttccggaatttcttccggactcaggctgcaaaatccttccactgcctcgtaaaacaactgattcggatatgcaagacgaatcactgacaactctactgccgtcagaccggcaaacggtgaagtcaaaactgctgtcaatggcagatcctgtcttgcattatcaagaactttcagataatccagaagaacactaacctcatacgtctcgaaatatccttctctgctcacagagtatgccggaattccctcctcggccagtatggacgcaaaaacttctgcccacccctgtaaacttctcgtcagaatcaccatatcccgataatgaaccgggcggtattctcctgtctccttatcaagcacaacacccgtgcttagaagttctttcattctctgtgcgatcatccgcgcttcttcttctctcgcttcactgctccgaagccccgtctgattataaagaagcagttccgtctggtccgtaaacacattttcatccggtaattcaggaaaagaggctcccaaatgcagtgccgccttatcatcatagataatttctccgaattccttccgcatcagtttcctgaaaatataatttgtactgtcaagtacttctcctctgcttcggaagttcctgtcaagatcaattctctgcctgctgctctcctgcgtactgtagctgttatatttttccataaagagttccgggcgcgacaagcggaatcggtaaatactctgttttacatctccaaccataaaaagattattctgtcctgccgactctcttgacacactcgtcagaattgtttcctgcaccagattactatcctgatactcatcgatcataacttcttcaaagcgttcctgatactcctgtgccactgctgacggaaccagttttccttccttttcttccgtcagaatccgaagtgcaaactgttccatatcactgaagtccaacagatttctctgtctctttttctccgaaaatgcctctgcaaaagcctgtaccagcagaactaacatcttcattgctgtctgtgcctcttgcatatccctgatccactcatcaacaggcgcgtagaaatagtttgctttcagatcttctatcagtttcttggcctgttttctaagcccctgcgctttctctttcagctccggatcgactgtcggatctttctttcctgacaaacgtttccatgtaaaattactgacgatctgctcttgctgacaaaatgtctctgctccttccaattgctcaatctgtaccagatcagaatctaacatttcaccatacatatacggaccggccggaagttcgcatacttctattgcctgttgaacaaaccctttcacatctgtgagattctgccttactcttgcctttgcctcctgcacaacatctgcttcttccatcttctccggattgatctcataattattcacacattccttcaaccacttttccggctgtggataacttctggaatattcgtaaagctggaggataagttcctcgatcttctgatcatttcttcctgttccatactggtcaacaaagtttaaaaatgcctcggatccctctgcatagaaattctcgatcagctcttctaagacatcctgcatcagaagacgcaattctccttcttctgcaatgcgaaaggccggatcaattccaatcacatgaaaatgatcccggatcaccgacaggcagaaactgtggattgtcatgattgacgcattgtggatcaatgtggactgctgctccagattcacatttcccggctgctcttccagcttcttttcaattgctgcaccgattcgttctttcatctctgccgccgctgcttccgtataagtcactaccaggagacggtctacatccgcgggatcattttcatctgttatcctggaaataatccgttcaacaagtaccgctgtctttccggaacctgctgctgcagatacgagaatgttgcggtcacgcaagtcgattactttctgttgttcttctgtccattttacgctcattctcctgcctcccctttctcttccaaaataccaagacgctctttcatagaattcaacgcttcttccaaggtatattttcttaatcttctgtactcacagccttcaatcctctggtcaaatccgcagatatccctgcacccacagtaatcacagcctgtcatctcatcaagtacatacggaagtgccgcaacctctccctgatacatcacgtccttcagctctttttctttctctttcgtgtacgcaagaaccgtatcaaagttctcctttgataaagcttttgatgccgaaccgagcgttctgttcttattcatccgcagcggatagaatgttgaagttccactcagattccgctccagatgctcaactacattttcatctgcattgatcagtccatccagcttcagctcttttagaatactttgctcaacttccgcttttgtctcttctttcttcacaatcggatcctggatcctgtaataaaaaataccggccggaaatacttctttctccggatgtttctgccgttcgatctccagtgccgcattcagataaaccggaagctgcatctgcaaaccgtgatagaatgctgtgatatcaaatgctttccttccagttttataatctgttaccttcacatagaccgcattttcatcttcacacgtatcaattctgtcaatctttccgcttccgaacttaaattcacacccgctcggcacaaaatcgcctgccgccatctgctgtgtcagtgcccagacggaccggttgatcaattgcttgattctgtggatcatatactcattacgtgcagatgaaaatagaactgtatttccataatccagaatactttcttctacactttcatcaatcagctgctcccgcttctcttccggcattgtaacccagtccagaccttcctcttctaccttgtgtgcaaatcgctccagtgcctgatgtgcaatgtttcccagatccattgcttcgaacccatatttctcccgttctgacaggcggagtccgtaattcaggaaatgtgcatatgcacaggaagcaaaacgttccagtcttgttacgctgacacgctttggatccaggaagagttcttttgctactctacttccaaggctcggctcatccttccggtagaaaccggcttctatcatctgcttcagagtttcctgactctgttcatcctttacaaaccatctgtacagttctttccaggaatcatccagtccatgctccctctctcttaaaccttctgcaatctgcaagagtccgctctttctcatcatctcatgatcaagcagtccctttctgtcttcctctaccggaacaagtaccgggaacagacgcatcagatcctggatcagatacgctggacgaagtgcttttccttccccggatacttttgcccaggacagatacagaagttctgacggtttcgtcagattcatatagagataaaatttctgaatatataatttctcttttggtccgggagaaagattcattttcttctcctggaactgttttctgtctcgctcggaaagcagacctcttgctcctgcatttcctggaagaagcgtatcatttgctccgacaaaaaataatgcgcggatatttttgatacgtgttctctccatatctccgatcacaacctgatccagacttggagggatcacacctactttcgcctcttcaagtcctgcatctaaaagttcacagtattccttcaaaggaatctcttcctcccccagaagttcaacgaatttatcgaataattccagaacaatacgataaatctgtgcatattccttcgccagtgccagttctccatcttcctggaatttctgctccaattctgcaagctgctcctggatcttctcctgaaccagatattcataaactgcaagtgtgatctcttttaccgtcttttttctcttcttcagaactgtatgcaacggtgtcagtttttccacaaaacgcatgcgcagatggttcagttcttccagttcttcctttgtcgtcatcggtgtctttctcacccagacctgatcccatttcttgaatcctttcagatccagcgcaagacagtaattttccagacggtctacttcatctcttgtaaacccacacaggctggtccgcagataacgaaaaacgctttcgtaagtatagttctgttctaccatcaccagcaagcttcttaaatactctacaaaagaatttaataaaatacttttcttatgatccataaagaccgggatttcatatcgatcacatgctttttccaaagcatctgcataagtactcagatccgaagcaatcactgcgatttcccgatatctgtacccttcttttctcaccaaacgccggatctcctctgccacatactgtgcctcttcctgtggtgtatgaacttcatgaagagaaattgaccgcatcttctctccactgtattttcttctggaataacgaaatagttcctcttctaaaaacgccatctccggattctctttgaatcgatacgacggattcttgcataaccagaccggctcatcaatctccactctcacttcctgcgccacttccgtcagtgaagtaaccatctgcttactcaacgcaaagagctgatacggattcttatagacaaacggatcttccctccgatcgatctcaactgtcaacataatcttatcgcacactttcagaagttccccgatcagccggttctgcaccggtgtaaatccggtaaatccatccattgcgatcacactgtctttaagcattttcgcttccggtacagtctgactcaacacatcaagtaattcttcttttgtgatatatttatcacgcagataatcctcaaatccttcatatactttacggatatcctttaacttataatacagatagctttccggattcagtccttccatgaaagaatcaagctgttcaaaatcaattccatactgtgtgaattctgatatcacagacttcacttcgctgatatatccctgcttcttaagatttcccttaagaacggtcagctcatcttcgtaatttcctgcaatcttacggagcaccagattcttaccctcatcatcaaggatcggctgtctttcctttcctgtctcttcaaaaacacggtgagccagacgtccaaaacttaagacatcaatattcataataccgccacgcggatgtgccatacacaggtccttctgcgtctgcattgtaaactgctccggaaccagaacaagataattcttctccggatgacagattgactccttaacaatctgctgatataaataatgggactttccgcttccggaattcccgaaaataaactgcaatgacatgctctgactcccgcctttcttcttaatatctaagcaaaagacaggctgtcgttcacaggaatgagccatatctctcagccttctctgtgcccggcagcccgtctgggtttttcctttcttctattatcgcaaatttatttcacaaggtcaaccagtgctgtcttaggaatcgcaccaatctgtcttccgctctcttcaccacctttaaatgcgatgaaagtcggaatactcatcactctgtacttctgtgcaatgtcgatattctcatcaatgttgatgtggcatacctttacatcaccgagttcttctgaaagagcttctacgattggagccatcatcttacatggtccacaccagtctgcgtaaaaatcaacgagtaccggctgctgcgcctggatcacttcctgctcaaaattgtctgttgtaagttttactactgccatctttatatcctccttataaatgttatatcttttatctgtaactgaacagttacctttttcctttgttacaaccttagtatagcacatattttttatttttctgtgataaaatcacaaagaaaccgacagtttggattttttctccctgccggtttccttcattacttcttatatcgttttatcttattgcaaccaggtctgcaaccctttatttacgcttcatcgattgccttaccgatatcatgtctcatgtatttattcttaaagtttacccactctgttgctgcatatgcattcgcacgggcttctttcagatcttttcccttcgctgtcacgccaagaacacgtccgccgtttgtcacgatctgatcttcgttgaattttgttcctgcatggaagcagtaatatccttcgtgcttcttgaactcttccagtcctgtgattgggaagcctttctcgtagcttaccggatatccttcggatgcgagtacgacacagactgctgcattgtcttcaaactgaagatcaacctgatccagtgttccgtcgatacatgcttccataacttcaaggatatcattcttcatacgaggaagtacaacctgagcttccggatctccgaaacgagcgttgtattcaagaaccttcggtccgtcttctgtcagcatcaatccaaagaagataactcccttgaacggacgtccttctgctgccattgcgtctaccgttgcctggtaaacatatttctcacagaattcttctacttcttttgtatagaacgggcttggagaaaatgttcccataccgcctgtattaagtcctgtatctccgtctccggcacgcttatgatcctgcgcacttgtcattgtcttgattgtctttccatcaacaaaagaaagtacggaaacctcgcgacctgtcataaattcctcaatgaccatctcatttccggctgtaccaaacttcttgtccagcatgatctccttcacgcctgcttttgcttcttccaaatccttacagatcagaacaccttttccgagtgcaagtccgtctgctttcaaaacaatcggaaacttcgctgtctcaagataagcaactgctgcttttggatctgtaaagttctcataagctgctgttggaatattatatttcttcatcaggtctttggaaaatgctttagatccctcaagaatcgctgcattcttcttcggtccaaatgtgcggattcctgcttcttcaagaacatctacaagaccgcctaccagcggatcatccattcctacgatacaaagatcaatcgcattctcttttgcgaaatctcttaatttatcaaattccatagcgccgattggtacacactgcgcatactcagcgattccggcatttcccggagcacaaaagattttgtctgctcttgggctctttgccacgcttgctgcgattgcatgctctcttccgccgcttcctacgatcaatacgttcatagtctctgcctccttactcggtaacgattgtacgatgtccttctacttcaacctttccgttcgcgatcagatcgattgcatgtggaaggatcttccattcagcctgttccatcactctgcgctgaagcacttccggggtatctccattgtgtacttctacagccttctgcaagatgatcgggcctgtatcagttccttcatctacgaaatgtactgttgcaccaactactttcacaccgcgctccaaagctgcctcgtgtactttcaatccataataacctgttccacagaaagatggaatcagagatggatgaatgttgatgatccggttcttatacttcttgatcatctccggcgggattaccacaaggtaacctgccagtacaatcagatccggctcatatgcatctacagcctttaaaagttcctgattgaacacttctcttgactcgtagtccttcggagaaatgcatttcgcatcgattccattttctttggcacgtgtcagtgcataggcattcttattattgctgatcacgcccacaagttctgtattcgtgatcattccattctttacgctgtcgatgattgcctgaaggtttgttccgcctcctgacaccatacttaagactcttaacataaagtcactcccttttcgccagcctcaatcttgccgactacatatggctgatctcctgcttcacgaattgcatccattgtcttatcaacgtctgccggatcaacagcgagaaccattccaagtcccatgttgaatgtgttgtacatcatctgctcttcgatttcgccctcttttgcaagttttgcaaagattggtggaatcgggtagctgtctttttctacaactgcatgagttccttctttgagcatacgcggaatgttctcatagaatccgccacccgtgatatggctgcatgcttttactgtaacacctgcatttttgatgcttttaagtgcttttacatagattcttgtcggagcaagaagtgcctctccaagagtagttccaagatcatcataataagtatctaaagattcttttgtaatatcaaatacttttcttacaagtgaaaatccgttgctgtgaacacctgtagaagccattccgatcagaacatctccggctgcaagattctctcctgtgatcatatctttcttatcgcaaacaccaactgcgaatcctgcaagatcatattcatcttccggcataagtcccggatgctctgctgtctctccaccgatcagagctgcatcggactgcttacatccttctgcaacaccttttacgattgcagcgatcttctccggataattctttccacatgcaatataatccaggaagaacagcggctctccacctgcacatgcgatatcgttcacgcacatagcaacagcatcgattccgattgtgtcatgcttatccattaccatagcaagttttacctttgttccgcatccatctgtaccggaaagaagaacaggctcttccatctctttgatcttcgcaagagagaaagctcctgagaatccgccaagtcctccgagaacttctgcgcgcattgtctcttttacatattctttcattaattccactgatttgtaaccggcttcaatatctacacctgatgtcttgtaatccatcgtaaatctccttttctttcgaatcgtaatatttatttattgttgagatattcctcataaccaacttctgcaagtctgtctgcttttgcctgtaccgtatctttcatctctgcagaataagctttcagtttctctaaaagctccggatctgacattgcaagcatctttgctgcaagaattgccgcattcataccgccgtcgattgcaactgtagcaaccgggattccaggtggcatctgaacgattgaataaagtgcgtccataccctccagattcttccctgacattgggataccaattaccggcattgggaaaagtgctgcgcacattcccggcagatgtgctgccatacctgctcctgcaataattactttgattccctttccttcagctgcctttgcccagtcaaaaaagacatccggcatacggtgtgctgaaatgatcgtcatctcataatcgattccaaacttctccagtgtggctgctgccttactcatcaccttcagatctgagtcgctgcccatgacaattcctacttttggcatatcatttcctcctcagtggtatactgttttccttcccttggaaaactttgtttatttattatccatacttatgaaagattccatttaatcatctattaactatccaattacctataggatttccttagaatcccgcttcatccaaaggctcattaagtacctctgttcccggcaatacgaatcttccgtcctctaatagtataatgtcttttccctcgtttgtcactacacttatttcttctaattctttataaggcacggttatatctgtatgacagttaaagtatgcttttgatacatcttccttacgaagaagagaacaggaattatctttcgccacaatttcctttccattcggattgtagactctgatttcctcgctccaggaataacatgtatctcctactgcaaaatgcggtcctgtcttctctgcgatcagaatcggcatcttatcttctatattaaatttctttgctgccacatatgcagtcgtatttgttccaattgcgaactcaccaagcggaagagtctcatgattcttcaacacattatcgtaaatgtatttcttattctgtgcttcatcctcaaagttcgtacatgtatagtcggtgatctttccatcctgaaatgtcagcttcagattctcatactgaagtccgtccagatataccttgcttacgtgaagtatgccgttcgtcccttccagaaccggtgatgtaaatacttctccgacaggaatattcacatctgccacacaattttcgaagattgtctccttctgtgtgtctttcagatgatataactgtactgtaatatctgtctggttttctccttttcctcttacatgtacacaagttccctgatctaatgcatcgatcattgtctgctgcactttttcataaagcttcgcgtctaatgtattgatcttgatcacttcatcaaagatctttgcataatctgccccaatctccggcaccggataagcaacaatcgtgaaacttctttcctcgcccttgatatactcattcgtgatctgtcctgatctgctgctaaagagaagatccagttctctctgcgcctcatcatatgtcggtactgtttctttcgcttccggtgaaaatggagtctcaccgaagatctccataactgccggtcctgcaacgcctgctgccatctctttattttgctcaaaaacggtcttcatcacctcaagcttacgttctacataacgcttatccataaagagtgcctggtcctgtctatgatcatactcatactgctgattcgcaattgcaccgtaatatccaatcttgtggtgctctctctttgtgatcacgctggaagctgcgcgataaataaccggctttaatcccatcttacggaagttttcgattgcaagacggatcaccttctcaaatccaagactgtaacgtatatttacaatcgatttctttgacagatcttttcctgtgttaataaaaccaatccgatatccttccgtatatacatctgccatcttctgcagtgtctcctgtggcagatttctcagatgatgagctgttccaagttcattcttggaaatgtactcaccgaattcatacagataatcatcttcatcaagatctgccttctcaatgatctgtactgcaaaatccgctgacggatccatctgctccagaattcggtctgcataaaatacatcgcagtaatcgcttgcataccagtacaggatctccttgatctgctccggctttggaactggattctcttcctcactcattccctcgaaacaggtatagacttcgagaaacaactcatagaggattgtcagataatccttgcactgttcaaacacatacggaattcctgctctgatttccgtatacaacaaacttaaaagctgtcccatctcctgccccaatttttcacaggcatagtcttgattggcatagcttgtctgatatttctctcctataatatcactataaagaatcctgttcagactacgcttttcttcaagacttaagctgtcccagcttccatcttctagcttttttcgtgtattctctaactcaagcagaaacaaggtacaatcctgaaagtaagaaatatatgctgcattcactgtttcttctgtcacgatcgtgcgcagacgctcaactgccagttcatgacgctgtgtgcactgtttatttttctccttctgtaactcacttaactttccgatcataagctcagacctccaacaaaaattccaaggaagcacaagatctgcacaataccgatcccgattccacatttgcaggaaagatattttctatcctgctcctcaaatccttctattgcattccagattccatatatatcaatcattaaagaaaggattgcaatccctccgacaattccggctgcctttcctctcgtcaggaatgcatatccgacacatcccagcaagatagcaagtgaccatccggtcaaccagcaggagatcacacctcttcttgactgcagatacgctgctttcccatatttctttgatttattactctttcgttccttttctttcttctgatttttttctctttcatcgtttttcttttctttttttccgatcatttcttctccttagtagattacaaactacaaaaactatatatccaagtacaccgccgattgtattcagcagaatatcatccacatcaaagcatcccactttcgtgatcagctgcattaactctacacaaagagtcagacaaaaactccaaaataacgttttaaaaaagcttcttctttttcctgccattgcagaaaagtaaccaactggcatgaaaatcagaatatttccaaataaatttgagaacaccgcaaatgttcccagctgatgtctgtattgaataaatctcttaatctctttgaatagcaccagattgtaatggtattcatccattacgccttccctgccgtaccagtctgataagaacagaaagtatacaaggaagataatatataatataaacaggatctttccaagcgtcctgactctcttcgcttctttttttgtcaatttcttacaccttcatagaaaaagaaagccccctctgccggttcacttcggacgtaactactcacactgaacaagctacgaggggactttctttttaaaatgttatattatttttatgttttaacagactggctccattgataatagaaataattcctaccgtaactcctgtaacaagcaggattattccgattgcaatgttacctgctccactgtttctcattacacgatacgctttttccaaaacaccaggcctccttattttgctccatatttctcataatatgcatcgatcgctgcttttaattcatcatcgatcactacttttccgtcacattccttgttgtaaaggcactctacaacatcttccattgtaacgatcgctgctgtctcaaatccatagagatctttcacttcgtcaagtgcgcacttctctccgccttttcctacttccatacggtttaaggataccataagtccaacgattgtaacatcagcagcatcttttactttcggaactgtctcttccatagatttaccggatgttgtaacatcctcgatcatgatcacgcggtctccatctttcagcttacttccaaggaagcttcctttatctgcgccatgatctttctcttccttacggtctgagcagtaacgtacttcttttccatataattcactgtatgcgattgctgttacaactccgagcgggattcctttgtaagccggtccaaacagtacatcaaagtcatctccatatgtctcgtgaattgctcttgcgtaatactctccaagtttctttaactgggatcctgttacatatgctcctgcattcatgaaaaatggggattttcttccgcttttcagtgtgaaatctccaaacttcaatacatcacagtctaccataaattctataaattccttcttatatgcttccattttatcttaaaacctcctgtttataaggctttcacgcctttattattgtctcaaattgctttactacacactttccacggtagctacgaaccattttacctaattctttaccattaagggatttacccatttgtgcctccttcctaagtgtagaataggaaggattccaaatatcgttcctattctaccataaaaccttacaattatcaatccgtttcaaaaattgaattcccactttgaaactcctccgtattcttattatggtactcacatagatcctttacatttaataatgctcttgtatcaagttctgtcttcatggcagccctgcctcctctcgtaatatttttattaaccaccttctttcctacccacaataagcggttgctaaggtaattttgtaagttaattgtagtaaaatatagaggataaaataattgacggtcacttgaccgtgacttgacatagaaatttttcaaagattgaaaatatagaaagacaaataagatagatggattgatacatcttctctgaaaggagcacgcagatgagaaacagactgaccttcgccaatgtgattggtgtattactggaaaataaaaaaaacctacccgcagcacctgcttaacgcagatgttgtctttcgtgatgttatgaacgagaacccggataatgattattccaaaagtactgctcgttatttgtatagtttgtatatgagatggggaaagaaagagcttgcggagcaatataaaaaatccggtaggtatattcctgccaatagtcaactgtctattcgacttgtggggtaccccccaagtcattatccctctttatgattcgttttcttctgtttctatatccagcctctgtaaaatatcatatatcacaccagaatcgtttaataagcttatagcaaaacatttctttcctgcatcttttaatgatgcaccaatgtgatacgcttttttgtcatcaatgattaaaaacctgtcatgaaatacacctgtgtagttcacttcaagtttgggatactgttgattgaaagtttcaatatctttttctgacaatctggttttcctaactgtgtaaatcgttaccgatactttctctttcttcttggacagaatatttaaagttcccacatcgacataattatcaaccaatacaagacttttcgttgcactagctaccagatctatcagtaagctaaacgcatcatatatctgtccatcgaaaaaaattttctgctgtgattcttcgtggtcagaaatatatgcaaatactttatcaaatttctcatttgtttcattttgataagttatctgtctttcttctattgcattcatgcgatcatacaaaagtgacgtgtttgccatatatttacgcatttcaacaaatgtttccattatcctgatactgacttgtattgcaatatcactcctcagcaccgcagaaagcattgcaataccttgttctgtaaaaacatatggcagatatcttcttccacctctcccttcttttgaggtcacaaattgtgacctcaaagagtcgtactcttccttttttagttgaaacctgaaattctcaggaaatctttcaatatttctttttacagcctgattaaaagtttttgtttcaacttgatacaaaattgccaaatcactatcgagcattacctgttttcctctaataacatatataagactctgtatatggcttgcttccctaaccctatcattttcatctgaatttacgtcaatcaattcactattatcttttgccatcgaatcctccaatccatttttgaagtcgcaatttgcgacttcaagtttacaatctgtgtactcattctgaggtcacaaactgtgacctcaaacagtatcatcgtgttccttcttgttttgcttcccaaattgctgctcatacaaaatctgatactttatcagccgtggaatatactcaggaggctttctgcgacccgcttcccactcttctaccgttcgaagtggtatctgaaaatgttctgcaaactgttttcgattcaaaccggtctctgctctcaaagcacgtattttctcacttaattccatactgttcgccatcctttatcacacacactcattgtgtggttaattatatcatgccacttcttctttatcaattgaaaatcaacacgaatccataatttacacaccaaacgagtaatccagaaactcattctcttctggctccgccagctcttgcttagaagcttctgacagctgttcctgctgcagtctgcttccgtaagctccgttcccataagagaccatgtgcctgaactgatatacagcggatgttcgctcaccgtcggaaccgccataaccgctgctcctgtatcatgtgtcgccggaagaatcaccttgcagtcgaagccgacctcctcacggattaccttgcgaagggttccaatttcatgtcctggaagctcaatcctctggaaaatatgttccggataatcaagccttctgattaactcccagttccagtcctttgtcaccggatccacaagctgtgtggttgtcgcattggtgtattcctgcaccggcttacctgtaagaagataatggaaataatccggaatcatcagaagtttatctgccttatccagttcctcctgtgcatttttgcgaagcgccataagctgatagatggtattgaagggttgcttctgaattccagtggctgcgtatagcttttcctcctcttctccttgttatagctatatgatacgaatttttacacagcaaaaaaagacactcctttgtaaaaaaaaagtgtccttttttgcactggtgatgactcagcctgttccatctgttgaagaatccagcagattcacaaggattatctgtgtaagaaaataagtcgccgccacccgcattttactttttctatctattctactttgaaaacttagcagattgttgcaccatccacagctaaaatttctcctgacacataacttgcaagttcacttgcgagaaagaggcatgcatttgccacatcttccggttctccgattcttccaagaggaatcgttgcaatgagcggctgaatttcttcctccgggagtgctgccaccatatctgttctggtaattccaggtgcaactgcattgacacggattccatattgtcccagttctcttgcaagagagattgtcagaccgtttaccccgaatttgctggtaggataagccactccgcctggctgcccgtacttacttaccatagaacttgtgttgataatgcagcctccgccctgctccttcatcagttctaccgatggctgaattgcgttaaatactgcgtttacattcagattgattatttcctgaaaatgctctggattgcaatctatcgtcatcatactgtcagatacacccgcattatttacaagaatatcaatctttccgtattttctgtgaattgcctggatttcgtctgccacttcttttgcgtctgtcagactcgggcaggcaccggatacttcccattccggattttcttcctttaaggatgccagtgccttatctactgtctcctgccgggaaccgaataatatgacctttgcaccattctccagatattttttcacaatggcatacccgattccgcgtgtacctccagttactactgctatttttcctttcagcataatatttctccttttggcgttttttaggcattctgtgcttttctttttgcaatttcttctttcattgcaggaagtgttttttccagatcaaacttgcttacaagaataaacataataacaaatatcactaacggtgttacaatagcgaatccgtaaattgccatttttgtagctgccggcgctacagtctgtgcagcatcatagccgactgccgcaaggaaccagccgatgatagatgttccgagtccgcttcccactttaccaccaaagctggatgcactgttggagattgctaccattcttacaccatatttatattcattataatcaattgacattgccgtcataactccaaccagacacatcatcggaatggttgcaaatgttgtaatacttccgaacaatgcgtagcaaataaagatgtcttttgtgaagagaagcagtatatttgctcctgcccccattgcaaagctcaccagtagcgttttcacaacaccaagtttcttaatcatcggtcctacaagtatgaatcctaacagggtcggaatcattccgattcctccgagaacgccgaccaggttgtcattgccgaaaatccatttacagtaatatactcccgcacccgctgcaagaccatatataatgcatgagagcagattcaccaccagaacaatcacccagtatttgttgtggaacagctttccaagtgcttccttaaacggaatcacttcttcatcctcttctttcacttctactaccgctcctgactctgttgctgtctcacggcttgttgcataacaaatcaaggctgccagtattacaataattcccatgataaagccaaatttaatccatgcgttttggtttccgcccagtgcattcgtaatcggaatcatacagattgcaaatatcatacctgccacataaccggttgccgctctccatgttcccatgatgcctcgttcttcctggctgttcgtacgaacggtcataagcgaattataagggattgccattgccgtatataatactgctgtcagaagaatgttcgttattgtcacgtaaattatctgtcccatatctcctattttcggcaccgtaaacatcagaaccattacaatacctgccggaattcccgctttcaaaagccacggacgatatttttcttttcccggttttgtatggtcaatgatatttcccataatcaggtctgtaaatgcgtcaataatcttacagacaataaacattgttgcaatcgccccggcagccataccaaccttatccgtatagaagtatgtaagctgtcctaccagtgtggacatcgcattcaatgcgaactgtcccgtagcgtctccgaagtaatccttcacgcgcattactttctgaacgccgaatttgtcctttcctaatggttttttactcattgtgttcctccttcatttcgtatcacattttttcttgatatcctgtaagcttaaaatatcacattcctaattgtccgtattttaattttagcttattttttataattttgaatttgcagcgttcagcgcatcaatgactgccagatacattggctttgcctgcgcatcctgcataagcagatcggatatggtcatggacaatgcaaacttaatcagcgggtcttccagcattcccggcaccatttcttcaaacatactgcggccaagttcttcggcgaccaactctccgagtgttgactccaacgaatatttctcgaatttcagattggtatccgtcttgtactcgtaatgatatctgccggaaccaaccgtgaattccgcttctttctccggaagctggataactgccgttgtattcgccggaatctgcacgtccacgcagatttttccttctctgcagctccatgcacttacgattgttccatatatggattcataagttgcggacacctctgtcattccctttgtcagcgtcggctgaatccgtattttcttatatcccggttccatacagcgtattcctgcaactttttcgtacagccagcttccaatcgaaccgtacgcataatggttcagggagttcatacctgattcgtcaaaatccccatttggcagaatggaattccaacgctcccagattgttgttgcgcctttctttactgcatagagccagcccggaaaatcctctttcataaagatctcatccgccaacccatgaagaccgttttctgacaaacaatgacacagatacggtgtacccacaaaacctgtcgtcagatgattatggtgggctccgatattcaactccaatgtctccaaaatacgattacgaaattccggttttatcaagtcaaagtacagcatcagcacacaggctgcctgtgtctcgctgaccattcgtccgcttcttgtcacgtattccacatgaatggcttctactatttcttcatataagtcaccgtatgcttttgcttcctctgcataccccaatgcatccgcagcatcccgcacaatcctggtcgaatatgcgtaataagcatttgccaccagatatttgtccgttccacctgtccggtcggtgcttccggattctatgtccagtgccagccagtctccatactggaatccactctgccacaatccgtttttcgagactctcgcatgtatataatccacccagttcttcatcatcgggaattgctccgcaagcatctctttatccccgtaaaccttataaatcgtccacggaatgattgtcgcagcatcgctccatgccgctgctcccgcctgatttccgagaatattcggaacaacatgaggtacgccccactccggattggtctctgccgccatatcccgcagccattttcggaaaaatagtgctgtgtgaaaattgtaggaggctgtaccacagaatacctgtgcatctccggtccagcccaaccgttcatctctctgtgggcagtctgtcggaacatcgaggaagttgcctctctgtccccactgtatattactctgcagttggttaaccaacgtgttgtcggatgtgaatgttcctgtcggctgcatgtctgtgtgcattgcacatgccgtaaaatccgatgcctctgtttccgttcctgcgccttccacacaaatataacggaatccgtggaaagtgaagtgcggcatcacaagcattcccacctgcttttctccgtatataaatgtatctgtacatcttgccgtccgcagattctctgtatagaagtttccatctttatccagtgtttctgcatatcgaataactaatctgtctcccataagttttggaagtcgtatttctaccagtcctgccatattctgtccgaaatcaaacaccaattctccttttggagtcacgatcctttcctttacatcaaaccgtttcgttacccggaccggctcggattcctgcgccacaatctgcccgatatcatccgtatgttcaaacagaactgcctttcccacctgccttctttcttttgtataatcctgtatctcaccgtgataaatctcggaaaacagaatttctcctgtttccacatgccagtccgtatcagtgccgatgcagatagtttccccgtcttcgtactcgatacgcaccattgccagcaaagccgttctgtcgccgtaaatattcggtcttgcatcaaacccgagttctcccttataccacccgtttcctacagtaaccgtaatctcattatctttttccaggagttccgtaatatcataagtctgatactgcagtcggtgatgataagatgtccagcccggagccatgaacaagtctcctgttttccttccgttaataagtgcctcatatacaccacaggcggtcgcatacagccttgctctcttcaccggtctgtccagagaaaagctgcggacaaataccggacatgcagtctcttcagccggaagtgtatgggtaatccattttgcattccagttttcttctctcatcaaaccggtttcaaagtttcctgtcacctgtcccagctctccgcaattatcccatacactgacctgcacctgataaacggtcatctctttcaatgcagcacccttatatggcaccagaacggattggtcgctttccacccggccactgtcccacataagctggcctccgctgacaacctgaatctggtagcttgtctgcacaacatcctgcttttcactctccagcttccatgagaaacgtggtttctcatcgattcctatcggattttttctgtattctattgtcaaatcacgaatcatatacatttcctctctttctttttgtttttctgattctttctattctatgaaaattttgccattgtacgaatcagagcggtaacattctcctgaagtcttgccgtgtctatggtaccgttctccaatcctttctttatctgaccggtatatgtatcatcattagagcccggtgtaatccagcagtttcccgcctgtaccattgctgccacatctacactgtcataggttgtccaatccgtcattacaaaaccggcaaacccattttcttctctgagaagcccctgtagaagttcttcatccgctgctgtcgggcagccgtttaccgcattatacgccgtcataaagctggctggcatatgaacatccatcgcatattcaaaagtccgaaaataaatttcccggattgcacgttcggaaatcagactctgatttcgctttctggaagattcacagttgttcccgataaaatgtttatagcagcctccgaccccggctccttccaatccttttgcataaaatccagccatgacaccggacaaatacggatcttccgaaaaatattccggctgtcgtccatttagcggatttctgtgaatattaaatgccggggcaagaaccagcggcatgcccaatgtcttcgcttcttccccgattacacacccgattgcttccgataattctttattgaacgaagcacagattgtaacgcctgacggcattccaatatttttgatgttcagattgactccgctgtttccatcgctcaccggaaagtccggcaaatcatatccttctgtctgaaacacacgacctgcctcaccaataccttccattccccacccagccgaggcacagacgctgatgcgggcaagttcctccggtgacatctgtgccacaaactcagccgcacgtgacggattttttcttacagcatcaaatgttaccttctcttttggtttctccatatcaaactttgcgggataatgtttcctcttctcataaggcaaaaatgtcaacttatttttgaccactccggaatgcgctcctgtcggccatgtatcatccggatttgttttggataatcttgtaaatttgcaatcgcagcaaagcaggttggttacctgtttgattattcttgtttcttcttcgtcgaatccgccgcattccgctgcttcaatactgtttcccacataaatacggtaatatccttttgataaaatatacgccgctttttcttccgaatatgaagtcaatactttcaccggaacatgaaccgaaatcttctgttcctctcccggaagcagttcctttgttttttcaaagaataccagttctttttccggctgctccagttctgattccggtttgcctacataaacctgaacaacttcttttccggctttttccccgacattcttcacatatacatccagttccagtacttccccgtcaaatcgaatattctcctgcctgatacaaaactccgtataacttaatccgtagccaaacggatacgccgcttttttcctgaatgttgtaaaataacgatatcctacataaatgtcttcctcgtaacaagtatccacatatatattttcatctgctgtcagacgtgttttatccacacagtcatagaaatttttcgacgacggaatatcaaaataatcctttgcccatgtatccggcagcttccctgacggatttacagccccgctcaggatatccaaaagtgccggtcctgcaagcattccaccaaatcccgaatatataagtcctgcaactgcatacttttctgcaaatgtcacatcaatcggatatccgacatttaaaatcacaattgtctttgcaaatgtatccgttacttttgcaataagtgcttcttcagcctcgctcagatagtattcccctttcgccgtggaagcatcctggttttctcctgctgcacgtgtcaggaacacgattgccgtatcggacaatttctttgcacgcatcaacatctcgtcccccggtatctcatccctgtcgcagccgtaaaattcaaccagttcttcattcagtgaataagcttctccttccctgacagcctccacaaaattaacactgtagcgaggattgattttgcctgcccccactgctccgatacgaaattcgtgaatacctctgccaaacagattcaataccgttcccttcttcagcggaagaacttctgcctcatttttcaaaagaacgattccctccctggcggcttccagtgcaatctgttcatgtgctgcatcttccggcttcggtttcactttttccacacctctgaccgtaaaatcctgcgaattcatctcattcccatccatatccacaaaaccttccacgtgaagttgatattcccgaccgtactctgtcacaagtccacgaagcggaattccaagcacccacatattccccataacttccatatactggttgatacagccggataccaccctgctatctaaggtgacggttccctgaatatccggattcatcggctttgcccacatcataagcagacagccggatagtcgacgatccagcataaaatacaatccgtcaatatcatgaaaatcgtactccagcggtcccatttcaaaaagcaatggtttatcttcttttcctgtcggaagctgttcccaaaaatcttccattcccatgttgagtcctccttttaaatactttcattgagttatctataaaatatcaaatcatatgatttttgtattacaatattgattacaatatttcaattttgtccttgtttttataaatagaacgccttataattagtattacatccatttcaaagagagtttaaaagtacggttttacctggaaaggagtcttccatgattactgatttaaaggcattttgtgaattattttatgcatcaacctccataccgattggctattaccacgcttcacccgacgatgactgttcctttccttcgattttggaagacccgtctgtttttaaaggcatcctgtccggtttccgacatttcacaaaaaacccggactattttatcgcgcagtccttcggctattatggttatataaagccggagcatgctgattgcgtaatcatcattggtcctgtattcagcacacctatttcagatcttacacttcgcactttcatgcaggaatgggcaatcagtcaggaacacaaaccggatatactccaatttctggtcaatattcctcagatttcctttaaccagtttctccagacacttgcctggcttcacctgtgtttcaacgatgaatatatttctgttggacagcattttaatctagaaaacacaagcagcatcagcgagttttccaatgtacattccaatcaggtgatgaatgcaaaggaagaacagcattttcataatacctaccagtttgaacagaaacttttgcagtatattcaaaatggagacgtcgaaaaaatgaaaacattgttaaacaccccctccaaattatcaggtggtcttatggctgacaactccctccggcaggaaaagaatgttttcattacaactgtcgcaattgttacaagaagtgccattgccggaggaatggatatggaacaggcttaccagcttgccgatgtatatatccgtgaatgtgaaaagctgcagaatatttcccacattgaaaccttgtcttattctatgctgattgattttacggaacgggtttcgcaaaataaaattcctcagggaacgtctctggaaatatttgaatgtattcagtttattactcaccacatcaacgaatccattcgggttggcgatgtagctgagcatatcggaagaagccgctcttatttgacaaacaagttcaaaaaagagctcggcttcgatgtctgcagcttcattatgcggtgtaagctggaagaggcaaaaagtctcctgacgtattcggataagacattaagtgaaatcagtaactatctttgtttttccagtcaggcttactttcagactgtatttaagaaaaaatatggtctgactccgacacagtatcggaatcagacccataaaatctactaatataccagacggggcttctttctatttgatgttcaaaacgagtttttcttctgcaaaatttactgctgaaatggttacgattgcctcccccggacattttgcagcccggattactgccattacactgccgtcataggtattccatgtatgagactggtaacttccttcgcagctcgggtctgcactaccaaatccctgcaatgcagcacatccctctaccttaattgtaactgctgcactttcccgacgattgaaatttcctgctgcgtcttccagtctgatttttacgaaagtaagactttctccgtcagcaggaagttcattccggtcagcttcaaccttaagcttcaccgctttccctgctgtctgtaagacagtccggcctgcctccgccccgttcagataactgactgcctccagctttcccggatgataaggtacttcatacgtcacaacatatactccgccaatcgactttcgtcccagactttccccattcaagaacagttctacttcatctgcattggcataaacatccacacttgctgtttccccttcatatcccggccatgtccagcttgcaagattatccttccacatccacggtgtctttccaacttcaattcctgccttatccatccgaagtacaccgatagacggtgcatgaccaatttcgaacactgcctgccgcagataactgattggtttacgatcaccaagaatatcaatgtcaccgatacctgccagtctgtccggccaatgcgctgaaaaattcactcctccattataatggaatataccgcatccggcttctcccagataatcatatccggtccatgtaaagtctcctaacacatgtggattgcgctttacgatatcccacaaatgaacaatgtccgccggaaaagtctctgtgccaagcacaacccgattcggatgacgtatgtgatcttcttcatgtaatgccgtcagataattatatccggcaatgtcatttgccgcagcaaattctcctatcatttcttccagaatcggactggtggcaatcgcatctgccagcggtcccaccataacctcagccatcccattgatttcatctgcgcctccacgcttctgctcatccggctgctgcatcgcttcaagctgctccggagtcatccctgtagcctggcacataatttcgcccattcggtcatttcctgccatcagaccattgattccgttcgtcgtatagcgtgtggcatccagccgtttcatttctgcatgaatcctccgattccattctgccccttttggagtgcccgcctccggaatctcatttccggtcgagtacaaaatcacgcatggatgattatagttttttcccaccatgtcccacacatcctgcttccaatgtgtcggaaaataatttgcatagtcatggggattctttgtccgagtccacatatcactcagttcatccatcaccagcatccccagtttatcacaggcatccagcattgccttactcatcggatgatgtgcacttcgaagagcgttaaatccggcttccttcatctggcggcagcgccgatactccgcatccggaaatgttgccgctccgataatcccattatcatggtgaatacaggttcccctcagtttcgttggtttaccgttcactaacagcccatgttttgcattcagccgaagtgtacggattcctgttgaaatatttacactgtctattggattctcatcctcagaaattgtaatccggcaggagtatagatttggtgtttcatcactccacaatgcaggatgttctacaagcaaacgctgacagcacatctgcgtgctttctccaaaaacagttaccggtatgtgctctgcggctgcttccgtcccattcggtccggtcaatgtaatttccacctgtaccgtttcggaaaccattccccgattacagattggaacctctacttccacgactgccgcctcacagtcagcttctcttgttgtaacacgcaccccctgagcaggaatatgcacagtctttcccacccatgcatacacaggacggtataaccccgcgccactataccagcggctggactgctctatactgcatacttctactttcagttcattttcctgtccatacttcagataaccgctgacgtctgcaaaaatgcctgtatatggattcacatgctctgttacaagatccccgttcatataaatgcggcaggtatctgcaacaccttcaaattccaaaacaactgtacatcccttccacgcttccggaatctcccactttttcatgtaagtatattcaccgcccggataaaatcctgtctgatgtgcattcgcagttgccggagttctttcctgataaatcatggcatcatggggcaaatcaatattttctatatttcctgcctctcccatcattaactccatcattgttatggttcctttggcaaactgccaattctggtttaaagatatttttttcatacggacctccctaatgcagcttgttcattttttaactattctaacagttgaagagtattccgtattataaatataaatttattattataattttgtaacacaatttttcagaaaaataccgggagagaggaaactcgaatcccctgtcccggcggtttttgttatatctataagtttattctgctgcgtttaacgctgcaacaagttggttcagtgcttcctttgtcactcccggtacaaaactcagcatctgtctgagcggcatggcttccatcattgccgccatcatttcgtcgttgatcactccggaatcatcctgcatttgttcctctgtactctcgccgtccattccttccatttcactcattgcctgttccaatatggcttttcctttcgggtctgccatgatttctcccattgtggaattgagggtatacactttcggcaggacggtttctgattctacctgtacttcctctgacagaagcacttcctgtgcattccggcaaatctggatttcataggctccggtctccacatgccagtcatggatttccgtattccagtatgcataggctctgctgtcaagttcaaaggtgacggttttcgtctcacccggtgcaagttctgttttttcaaatgcttttaactcccgtaccgggcggatgattgttccgcccttcggcgctacgtaaagctgtacgacttcctttcctgtacatgcgcctgtattcgttacgtctacggataccagcagtttttcgctttccttaaactcctttttgtccaacgtaagattgccgtaagaaaaggtcgtataagacaatccgtatccgaacgggaacaggacttccatttctttggatgtgtaatagcggtatcccacaaatacgccctctgaataaaccgatttgtcatgttctccgccgtaattcaaatagcacggcgtgtcctgtatccgaagtgggaatgtttccgccaatcgtccgcttggatttgcatttccgtaaagcacattgaccactgcgccgcccacagcctgtccgcccaggtaggcttccagcacggcttttacttttccgagccacggcatttctaccggagcaccgttgtgaagcacaacaatggtgttcggctgtgcttccgccaccgcttcaatcagtgcgttctggcagttcggcatcccaagatgcttccggtcatacccttcggattcaaagctgtccggcagtccggcaaagattaccgccacgtccgcatttgcagcagcctctacggcttttgcagccaatgcttcatccgctttatcctcaacatcatcaaagcctttggcaaatgtgatgttttccttttttacagttgcgagaaattctacggcgtccattgcagattctgttttaaagctgttgatgtgggaacttccgccgccctgatagcgtggttcctcggcgtatttgccgataaaagccacctttttgtctgcggacaacgggagaagcgcatcctcatttttcagaagcacaatacactcctcttcgatttcccgggctgtctcatggtctttttcacgctgaaataccgcgtttttgtctctgttttcctcatatttgaaaataacattcaaatattcttcacaggacttgtccagtacagattcatccagtgttccgtcctgtactgcggcaacgatttctgcatccgtagcgccttcacaggacggcatttccagattgcagcctgctttcagagcttccacacggtcattcatcgcaccccagtctgtcattacatagccgtcaaatccccattccctgcggagcacatctgtgagcatttctttgttttcacaaaggtatgtgccgttcagcttgttgtatgcgttcataatggtccacggcttttccttctttaccattccttcaaaagaagcaaggtaaatttcacgcatggtgcgttcatccatttctgaagagcttgttaagcggtgatattcctggttatttgccataaaatgcttcggacttgttccgatatgtttgctctggacgccgtggacaagcgcacctgccatttccgttgacacaagcgggtcctctgaatagtattcaaaattacgtccgcacagcggggaacgcttaatgttcatagccgggcctaagattgtgcttacattttctgcctgacactcttcccccagtgtttctccaagttttgtcaccagctcacggttaaagctggatgcggttgcacatcccgctggaaagcaaacagcctgaatgctgtcgttgattcccaaatggtctgctttatcgtcctgcttgcggagtccgtgaggtccgtctgagaccatttccgaagggattccgagacgttccactccttttgtgtgccaaaaatcaagcccggaacacaaagatgctttctcctccagagtcattctggagaccaattcttttatttttgctgtttccatgtttcatcctcctgccaatctttctcttttggataaagatagcatacatttttcttttcgtattatagttttgagttatttattgtaaaaataggtttgcatttcctttactaaatgattagggaatgcagtaccccgttccctttacaggtcgcaagcgcaaggatttcttcaatcggtccccgatatggaaatttaatagtgcctaacaccactgtggtctttcctatattattcaaagtatctgcatttttctatataaattattttagctaatactcttgtcgtgaacaaaagattgtgaaatcaagagagataaagtataatagctataagttatttttctgaaaaaaatcgaaagggtgacagttatgcaagataaaacaagtacaatttcaacaaacataccttgtggtctttatgttttgaagcataaagattttgatgttgctatggttgatatcgatatttattcaggaaaaatacaatatatattagacgtgtaccttccggaagaattaccaattggatgcaaccgattggggaagaacattgttggaaggacttgaacttttatgaaaatgattttaccgatgaattaggaagtttgttaacagattcaaagaatgtggatgtggatgcgaattactcgaagttctctccggcatcatcgttaaatggtgagatgaagaagaaatgggttattgagaacggaatccgttacctaatgaaggtgaatgcgaatgattatgggcagcagtccatcaatgaagtgattgcaagcaaacttcatgaaaaacttggttgggataattatgtccaatatagagttgacacggcaatcgtagatggagaaaaagttccgagttccttatgtcagttatttacctcgaatgagttggaattagtgtctgcatatcaattgatcaaggatattaagataccaaacgattcctctgaattcgaggagattatccgtcaggctgtgaattatggaatggaagaagcggtagtccgtcaacaactagaatatacgattttgacagattttattctgagtaatacagacaggcattataacaattttggatttttgtatcatccgcaactacaccgattggttaagatggcacctgtttttgataccggaaattcattgttttacaataaggaaatcataccacagggaagcaaccttctggacgtaacagtaaattcgtttaagaagaaagaggttagcttactggaatatgtatcaaaatcagatcttgtggggattggtaaattagagagctttccgaaagaggtttacaatttactgacatgcaatacagatatgcctgatgaacgtgcgaagagtatatcaggaaccgttcagcaaaaattggagtatctgaaattatttcaacaaggcaaaaagatttggaaaaaagaaaacaggtttttgatacggcagttacgtattattacaatcaagcatgcagagtggtagaaggaatgcgagtggcagaggaataccgtgcaaaagctaatagaacagttcgagaaatccgaaattaataaatgaaaaccgtaaatagtatctaaaaggctgtcgcttttataataagaagtgatggcctttttgtatatataatccgaaaagttgaaatctaaaagaaagcagaaaattctggaaaaatcttgggcaaaaccattttcagatattattttttcaaacattgatgagatgatatttgccccactctatagtgataagcgtaattcacgtccgaatgcacctgtaaatgtaattgtaggtgccctaatccttaaggaactcaatggacttacggatgacgagattattgaagagtgtgagtttgatttccgatatcagtacgctcttcatacaaccagttatgaaaaccagcctttgagtaatcggacgtttagcagattccgcgaaagaaatgcagcttatgaactgaccaccggaaaagatctgattcatgactgtattgtagctctttctgaaaatatccgtaaattcaggtaaacggagccggaacacagattaccgaatgtcctgctggaaataagccaaagagcaattcctatattaaacaaacagattccatacgagcttcgttctacagataccagtgtgaaggatgcccataccaaaaccaatgcaatcctgcaataaaagaaagaacagcagtcatgatggttccgttaaaatcaagaagacgaatcttagaatcatcagaaatatggaacgatgccacctgggcatggattggaagaatccgaaatggagtggagactgttccatcagtcatccgaaataaatatctggtagatcaaatgccggtcagaggaacgctgagaaccaaacagttcttcggctttaaagttgcttccctaaatatcactaaactgatgagatacaccaaagggaagctgaagtgcagaacttttgagctggcatagggatgataaatcgccctttcgcggaatcgaaataccaaaaacatagatttattcagttgtcaaaggacaaaaaatatgtgcagttgtcagtcacagaaaatgtaacttttgacacccacatcataaaaaataaaacggcagaaaaacaacttattcataagaaaaattttagttatataagcggtaaggaaagccaaataaatttttatctgcaggaaccgcagtgctgcgaaagataatattatggaaaaacgaattgtctaaaatgtcagaatagtatgaatgtctattgaaagttgtctaaatatataatataatactattacaataaaaacgagtattctttgttatgagaggatgagaatccattggcatattaatttcacatcgaaaaaatataggaaagtagtgtaaaatatttatttttaagaaagatatatgtgttgccagaaatcttgtggaatgtaacagaattaaaggaaggaaaaagaatttatgaaaaagcatttatcggctatcataacaagtatcggaatcatgattggaattatcttactgattttgattcaggtaattggaaagacgaatatccttgacatactggtaaggtgctatgctttttctatcccattatggattactattattgtttccttaaaaagaaaagaaaagtagtaccgctattttaaaaaaagaccaccacccgtccaacgggtggtttgctctagggctataagcccttgttactaggcccgcgtctcaaggcgctggctttctctttaggctatggaaattctgtttacacagccttcccacagctccgttcaagccatattgctcttaactcgtcgctaccccttaaggggctttgttactacttggcattaacccttaaaagggttctcatattcttttacacttaacttatccattgcaatatcgtgcttttcttgttcctggatatatttttttattgttgcctcatttaatccaactgtgctaacataatatccttccgcccagaaatgacaatttccaaatttatattttaagtttgcgtgtttatcgaatatcataagtgcactttttccttttaaatatcccataaatggtgatacgcttatctttggtggaatacttactaacatatggatataatctggcattagatgtccttcaataatttcaacgcctttataactgcacaattgctttataatatctctaatatcctctttgtattgattgtaaattacttttcgtctatactttggtgtgaatgctatagtaatctaaatcacacatcggcggcatatacgacaccaccggcaacaggggttcttcctctatgtacccggctgcgccgagtacgtcggaataatcctccgtggcgcagcctttgatatacacctggcatttctgtttggtgccatcagtagtaatataaattcggtcaacaatcgaatgaaccaaagtaaacagagcttcaggctgtgcgtcctttgcaaactcctcaaaggacagcagtctttttttcatgccattcagttcatggatgagatactgattttcagattgtgtatcttccattcggcgcagggtagcttcgcgctttgccagctcgtccgttagttcctttatatcatcctggatgaagcgtttaagggcgtcatctgcttcgcgcagatttcgcacctgtgcggcaatatccgcatttaagcgttcaatcgtctttttggtttcctgatactctttttcgctttggtcggtgcgaatcatgccggcaaccctgttctccaaaagctgccggtaatagtcggaatgttcttcttgcaggctggagagtgagtggataacaaattcatccagcgttacgccctcaacccctttgaaggtacactcttttgccctaacccctgggcaggcatacttgaagcggggcttgccattcgtccagcgattagattctggcagtacccgcagccgttttccgcaaatagggcaatacattaagccggacagcagagcattggtttttctatggggccggttatacttttctgcaatctcatccagcatattttgtgtttccacccattcccgggagctgataaatccctcatggcggcccacggaaacaatccattcactaatgggtttcctggtaagaagctgtgagaacttgggattgaaaaaggtggaatcctcatcctcaactttcatctggtcggtcttattataagcagtaagtccatgctgaccatcaaagtcggacggttctccaaacaggtttccgtcatgctccagaaaatagttgtaggaatattcatccgccacgcagtagattggattccgcagtatcagccggatggtggatgtggtaaacttcgcgccatgcttcgtttcatatttctcattgatgatatttgccgtttgcaagagagaacgtgtctcccagaaggtgccgtagatttccagtacaatctctttttcctcctgcacaggaacgagaaaactaatggcactcttgtttttcccacttcctgttgtcacacgttgggaagaaaagccggtcggtgttttgccgcccagccagcgcccatctttcgccagctccatcaggttatcctggatacgttccgtgagaatatcgcgttcaaattctgcgataatggccagcacctggatgataattttggatgtgctgatccgcgtattgatattgttggagcagactaaaagcgtcacatcatggcgctcgaaatattccagcagccgcatgagatcggaagttttccggctgattcgatctaatttatagcaggccacagccttgattttccccatctcaatgtcccggagcagcctttgaaaatccgggcggtcggaatagtagccgctcaagcctttgtcctcatatcgggcaaattcgtaatcttccggtagggaaagctggttgatcgcgtagtcggcgctttgcttaaactgaacgccaatactgtcccccttattcgtaatacgggactttctcgcatatatggcaaccaatctatcatcgattcccgtctggattcttgccttacgtttcatattcaaatattctcctttccagggcgatgagtaaaccaccctttctccattattataggaacatcctcatttttgctcaaaggtgcgatgatcctctttcagtgtggaaagcaatgcttttaattcttccgcgttcaaatcccgcaattcacgggataaaaactcggcgcgtttttcagcgaactggcgcagggattgctcgctgtctttcccagtatgaaatatgatctccatctgctgtaccccagtcatggacggcgctttacaacctcatagtcaaagccgggccgctggccgcagtaggtgcagatgtccttttccacccgttcggggtgaaccctgcgcaaataataagagcctgtgccgtagaagttattggcacaggccgggcaaaggcacatgattaagttttcgggaacttcctcaatcagcccaacgctgaccgccagcgcgtgattgattttgcggatatgcttttcctccagatgtccgatgtacgcgcccagccgtttcttgtcaatggtgcggagctgttccaaaagaacgagagaaggcagttccagcccgttttccgcctggagaagatagtgggtgggcagcttggccttggcgtccactttgctggaaatggccgccacaatgacggtggggctgtatttgttccccgtgttgttctgaagaataaggacggggcgatagccttcctgctcggagccgattccccggcccagatcggcatagtacatatcgccgcgcagatatgtcctgttcatgtcttatgacctccctttgaaaaattaggcggcgtgggccgcctatgtaaaggccgcacagcagaacagaatgaaggccggggagagataaaaccattctcctgttttcattggcccgtcctgctgtacggcccgtatttcaaaggtgctcctatttgtcctcgacgccccgaagcaccgggtgggaagtcatcaaacggctggcggcttgccagctccacggggaatctcacccctcgcgtggttctcacgcgaccgcccccattgcctgcgacggatcacggcggcgggccgcttcaacgctcggacgttaggctggacgggagtatcattgtccccgctgctggtcatggccgtaccgggagccatccggtactgacagcctgctgtttctcgctccttgccgggaagaacaaaccaaagacctgcattttctttttcggtggtgtctcgttgttttcttccggcagatcgccgcgcagcagccgcctgggctttggctttcgccaaagcagcgggaatgtgcctgatgaatgggtatgcagttttcaaagttccgggagagataaaaaagacctctcactctatttgccgttgagtgagaggtctaacaaccctatttactcaaaaaagtttttcagctttttgagtatccggcttttccgcttgtggacggcctgctgggaaacgcccagtccctttgccacttcgctttctgttttctcgtcaaagaacagggcacaaatgaaatcccgttcttctttggtaagctgcataagcgcggtatgtagcttgtccaccgcaagttttcggatcactacatcctccacgctctccgcagcagcggcaaactggcgggcattttcttccatgagcctgtccagggaatcctcccggctggggagaacctgtttgatttcgccgttgctgccgtaaaccgggcgctcgcttttcagatccgcctcaaagtagcgcattttccggtcgccccgcatataagcggtatatacctcgtccgtgacctcgacaaattggccgcgaacccatattttctttttaccagcgtccacgctgtgtacctccgtttcgtctgaatttcgggaagaaatccagacggacggcggccccctgcaacgcggctggcttgtcctaacgggaaataacagaaatctgcatttcccgacatagaaaaagcgcgcacaccttctggtgtacgcgcccggctgttggcttttggcggatgatgggtaaggcccagggaaaaggaaaaagcctgtcgaacaaaaaaataccgcaatccccttgaggactgcggtatgtaggaaatgcggatttaatccggcgcagggcgggcaggcccccgactttttcttttctggctccatgtgctatccccttatggggataagctgacagacatcaccacctttccccaaactaaaatgttaataggggtagtataataggtgaaatacaaataaaatgagcaaaaaacgcaaatggaacacaattcggtcgcaagttcagacaatatgcggcgggaaaatctcataaaaaatcggcatttgcaaggttttggcgagttggagtgaaaacagacaggaaaaagcagcagcctaaaccgttagactgctgctttatactaagaatgaacctcgaagcgataccccacatcccggatacaggaaatcacaaacggtggtttgggatatacggcatataatttctgccgcatactgcggacatggctgcccaccgcgatatgttcgttgccaaaaggttcttccttccagactttttcatacatctgcccataagtaagtacccgccctttattggtcactaacaggcagagcagggcaaactccttggtattcagctcaatttcttgctggccgtgatagatttttcggcggtctgggtagatttgaaggccgggaagggacaggatcggctccgagccgatttcccatgttttcaattccaggtgaagctgtaaaaaggcaagaaaatcttcaaatgtcctttcgtccttatcctccagttccataatcacaactcgtccgatggtatcacctcccggctgcctaagaaggccgcttcttttaacttctgaaagctcgtttcactgatgacgtgttccagcctgcaagcgtcctgcgccgcaatatcctggggtacaccagcctcgataagctgcctggtgaaaaactggtgtttctcacaaatctgtgtagctatttgcaagccagaatctgtgagggagagtgtgccatcagtatttttgacaatatactcggatttggacaattccttgacagcccggctcacagaaggctttgtaacccccaaatgtacggctatatcaacaccgcgaacgctaccgtgcttttgatgaaggataagtacagcttcaagataatcctccatagatgatgtcaaagccaatggcgcacctcctttttgaatcattgtgccaatttcaaagattcctgcctattcatcacaatattgtatcctcatttacatcatccgatatgccacaaaaacagtcattcgttatatgcaggaacaatggtatgagacaggtggaacttaaaaaaacatgatatttatttaaggtgaattgccgcaacatctacatggttgggaatgctattaaaggtataggactcaatcacatcgctattgaatacagcgtattcatttcgatagttgagcggaataatcacgctgctttcattggcggagttcaaagcctctgtaaagatttcttggacaactgctggatcgtctgtattatacagtccagcaatcaacgctttagcttcttcatcgctcatggtggctaacgctttggcaacctgtgggtcagtagaataaataccgctgggatctgaataatcggtagacggatacatattggctacaaaagtataggggtcataagggaaccaataactcatgtaagctgttatctcataattatcctccataaagacctgctgcatgaacgccattagatcaatggggttagttttaatctcaatacccagttcttccatagcactttggaaaaagagaaccacattgtcgtatacacccgtggatggatatgtaatggtaaaggacaaaaccttaccgtccttttcgcggattccgtcgccatcggagtctacccagccagaatcctccagaagggcgattgcacctgtcatatcgtaatccggggttgtcacagttgcatcacaataaggcatatctgctggcattaccgaattagccgcagttcgcagaccggcataaatattctgtgcgatggattctttatcgatcgccatttggatggccgtgcgaacattttggtcatctaaaggagcaatctcatcattgagggcgataaactcagtcacaaagttgaaatcagatataattcccgtgatcccctctgtttgcgaaagttcctgataggagttcgcatccagtgtgtcggagccaataataaaatctacttctccagatctcatagcggcgaccttggactcagggatgacttttacagtaaaacgatctacatccggttcttcgccccaataattcggatttttcacaaatgtgtattccgtggcagtttcattcacactttcgaacatataggggccggtgccgggagtatgggtcatcagatactccgtattgagagagccatcatcattaaaagcagcggcagagagaataccgcgaggcatcaccatagcaaggtcattcaaaacgttgtagtatgggcggctcaaatggaaagaaacggtatactcatcatctacagtaatttctgtagttagcatatccagttgtccatagtttgcactggttccaatgactgacttcatattgtcaaagtagagcttgacagcctcggcgttaaaagcagttccatcattaaactgcacatcttctcgtaaatagaaagtataagtgaggccatcctctgaaacagtccagtcggtggcaaggcagggctgatattccccgtcacggtattccaccaagctctcgtaaaagttgttcatgtaatatgtagtctcataggactgaacgccgggggcaaagcccatagaaaaattggcgctctgcgcaatagagatggacttctctgtttcatcggaaccggaatcaggattatcctgtccgccaccggtagtaccacaaccggcaagaagcatgacgctcataacaccgaccaacagcaacgataagagttttttcattttacaacactcctttttgattttttattgtaaggccagtcgcttggaacggacggccttgacaagcatttgtgaatagggttcttgaaaatcagaaaaatgatgtggctgttccactgtttcaataatttttcctctgcgcatcacatgaatggcaccctccatatacattgcggtgtcaaggtcatgggtgatgatgagaaatccaatctgaagttccttatggagttctttcaaaaaacccaggatttctttcttcaaagtgacatccaatccactgaaagattcatcaaaaataatatattgaggacgggttgccagagcccgtgcaatacacaatcttttctgttgaccgccggaaagctcgttaggccgatgagaaagggtggagcgttccaacctgaccatatccatgagttccaggcagcgacgcctcctatcttgggctttcatatgaaacaggagttgtagaggttcctccagaatggcgtcaacgctttgatggggatctaacgaacccagggcgttctgcattaccagttgtaccttacctcgaacagagcgaatctctttccgcttacaggaagtgacctccaaatcaccaagaaacacttttccaatgtcaggcagctcaatgtaggacaagactcttgccaaagtgctttttccacttccgctttcccccacaagtgaggatacacatccatcttttagttccaaagaaacatctgacacggcgtcaaaaactgtgtgtccgctatctggtaatgaatattgttttgtaatatgttcggctctcagcatagttcctcctgaaacagcacgctggcctgaacaagttgcctggtatattcgtgctgcggttttgtaaagacatctttggtttttccggtttcaatgatttccccatccttcataacggccacccggtcacatatcttagcggccacgccaaagtcatgggtcacaacgatcatggaaacgccagatttttttaatttctctaattcattcaggatcagatactcactggcagcatccacagcggtggtaatttcatccgcaataatcaacttcgggcgttgaagaagggtgagggcaatcataacgcgttgcagcgtgcctccagataattcatgaggataacttccaaggatttttcgcgcatcaggcaaattgacatctgcaagcgcagtagcgaatcgttttcggaatgtcatcctctctgtttggcctttcagtgaaaatcccatctccacctgctttcccagcttgagcattggggcaaacgcggtcatggggttctgagggatcatactgatttgcctcccccgatagtctctcaattcgctcattttcaccgtgagcatttctcgcccattccattggatgcttccagtttggtcaaataatcggggattgagaagtttcataatacacttgctggtcatactttttccgcttccgctctccccaatcaaccccaatgtttccccgttgcccacagaaaagctgacggagtgtacaaggacttcttttgtccgctttgtgcaaatggaaagattactaaccgtgagcatcatgatccctcctttggagcacagaggtctcgcagggcctccccgaataaattgaatccagccgcggcaaataaaatgcacagacctggatagaccagcagttccggatggctaaacaatagtttattggcgttcacaaacattgcgccccactctgccgtgccggtctccaatcccaagcccaagaaagcatagctggagatcataatgataatggaggacaatcctgtgctatatatcactaacaaatgtggcagaatattcggaatgatatgccggaacacaatgcgcagttctgagcacccggacattctacaggtgatgacatacggttgactccgttctcggagtacatgggtgcgaaccactctcgcattccacacccacatagcaatcacaatggaaaggatgatgctggttactttggactcaaaaagccctaccaaagtaattgccacgaggaatggcggaaatgccataaaaatattggataccacctcgaatacccgatccacaataccgccaagataagcacataaggttgcaatgacggtactgataatagccaatagcagcaaagtaggaagcgcaatactcaaagattccctggctccgtaaattaagcgagacaaaacgcatcgtccaagttcatctgtcccaagtggatattgtgtatctggcggagcaaaactatgggccacattcagttgcataggatcattaggtgccaaaaaaggggcaaacaccatcaccagaaaaacaatcagcatcatggcaagtccaattaaagcctgagggctatggataattttacgaatcatgatcttcctcccatctggctttgaggattcaacaatgtgttcaggcagtctgcaaggaaattgaccaagacaaagataacggcagtgagcaatacacacgcgttgattgttatggtatccctggcgtttaatgctgtcaccaacatggaaccgagacccggaatggagaacacactctccaccatagaactgcctgcaatcataaacccaaagctctgcgccagcatggtaattaacggaggtaacgcaaaacggcttaccatatttgcaattttccattctgatactccccgtgcccttgcatataacacaaaatcactgttatatccatctaacagggaagaacgaaatacccgaatggttcctgccgacgtagggatagccaatgccagagccggaagaacaaaatctttcagactgtctgcccccataatgctgaaaatagggagatacacggcaaaagcaagtaaaagcatgaaaccgatccagtaatttggaagtgacatacaaataattccaaacaggtagatgcttttatccgctaaacctccttttctgctggcagataaaactccaaggggaatacagattaccgtactaaacaaaagtgctaacacagccataatcaaagttggctgtatggatgccgtcagttcctccacaatggaacgtcctgtgttgtatgaatttccaaaatcaccgtgcagggcattccacaaccaagagccatattgctggaggataggtttgtcaaggccaagttcttcccgcactaattcaatctgctccgcggttggccgactgtaacgacgcacagccaatgcctcagccgcatctacaggggagaggtttgtgtagacaaaggtcaggatggttaccccaaacaagacaatcaaaagtaatacaattttagtgagtacttttttccctatcattttccattggcctcgccttttctcggatcagtaatgcgccacgattctgccgatttccgggaatggacaaaatctccatagatcccgccctgctttatcaattcttcgtgagtgccatgctgaacaatctttccgtgatccaccactaaaatctggtttgcatggcgcaccgtttttaggcgatgggcgatcataataatggtcttgcctccggttaatgcttcaatggccgcttgaagctccgcctcattctccgggtcaacatttgcggtagcttcatccaagatgacaacgggagcatccttcagcatggctctggctatggaaagccgctgacgttcaccgccagatattgtggctcctccttcaccaatcactgtgtcatagccatcaggcaacgccataataaaatcatggcagcgggcagcttttgccgcagccaccacttcttcatggctcgcctccggcttaccaaacttgatgttattttcaatactgtcgttgaacaaatacacattctgaaaaaccatactgaaattgctcatcaaactgtccagcgaatagtcttttacatcaatgccgcccaatttcacggagccttttttcacatcccagaaccgggccataaggctggtaagcgttgttttgccggaaccagagggccccacaatagcggtagtcgtgccttctggaatggtgaagctcacatcatcaatgattttccgatctccataggagaaatccacatggtcaaatgaaatatcatggcttttcggcacctgaacagagccgccctcatccatcctgggtgcccggtcaatttcctctacccggtcaatggaagcatcaatcatcggcagcataaagaacatctcaccagccgattccaattcgctatataccaggaacgcagataccaccatcatcaaacaggagaagagcgacatatctccttgcaggaaaagccagatggaaatcaggattgccaacacagaagtaacgcgcaaaacaacctgctccagcacgttgtaggggatgcgtttgcgctccaatttgaagttttgattttctgtttctttgatggtattgtttagagtttgttttgccgctttatccccgtggaaagcgcgcaccacactcatgccctgtatgtattccagcacagcatccaccaatttagtctgtgcagccaatcgtcctggggaaagctcacgggatttcttgagcagtcgggaattgacccaaaggaacagcagcatcccaacaaagaatacaagaccgattctccagtcgaagcacatgatcgccagagaaaaaaccgcagtacgaatcatacccacaactgtccgggcaatcactgcgaaagacatactctccaaatcggacattgtggaggttgctgccgcagtaagactgcccaggctctgcgcgttgaaataacccatcggcatatatttcatgcgttcaccgatgtgaatacgcttttctccgcacattcggtagttagcgtgtccttcgctattgtgggccagataccagcagagcgcggcaccagccacactaaccaccataattcccaaagctgtccatgcggtggccccggttatattctgttccaccaacgcccgtagcacgatcaatagagcgacaaattgtaacgcttcaaagatgctccgcagcagttcaaaggccatacctttataccaggtacttttctctgtcccggaaaatcgaaagaaccgtttatatgcgtcaaacatacgccgcacctccttccatctgatcgttgtctcgcgcctgcgtgtgagctgcccacatttgctgatatagcggacaccgatccaacagttctccatgcgttccggagtccaaaatctttccgtgatctaccacagcaatttgttccgccccagtaatggtggacaggcgatgggcgatcacaatgagtgtctttccatgagttagccgccctatggcatcctgaatgaccgcctcattttctgggtctgtgtaagaagttgcctcgtctaagataacaatgggtgcatttttcatcatggcccgtgcaatagcgacccgctggcgctctccaccggagaggtgtccacctgcgccgcctactacagtttcatacccgtgatccagacccatgataaactcatgacagcccgcagcttttgccaccgcctcgacttcagcatccgttgcctctggcctgcccatgcggatattctcacggacggacaaattgaacagaaaattatcctgggatacataaccaatcaaatccattacctgctctggaggaagttcttttgcgtcaacacctccaatggtgatatgcccgtctccaacatcccaataagaggcgataagtttcgcaatcgtagatttaccagagccagaaggccctaccaatgccgttgtggttccttgcttgatgtccagggtgatgccgttcagaacttgcgtatccttataagcaaaagtcacatcccgcagagaaatatccaatcctttgagatttttccgctgggacggacgatccaggtcagactcggacaatacggcagtaatttctccggtgatagtagcaattttagaaaaatcatccgtcaaaaaaatagctgcaaccagcggccccataatgccaagagacagaatggcaatggtaataaagtccggagcagacaaagagccgttcatatagaacaagcatccaacgggtaatacaccaatcaatacagccggccaaatcgtcatcatcagagcagaatagccctgggtggatttcatccagtccagcatgagatccacgctctggcggacagcctgtgtaaactttccataggaagcagcactttgattgaacgccttgatgacctcaatcccattgatgtactccacagtggtggcgctcatatacttacttgcctgaacaacagcaccatattttttagggtattccttcatctgggccatgtaacagagcattccgatgggtatcgtaatcagggataccagtgccattctccaatccaatacaaacaggtaaataatgatggcgatggggacaagcaggttagaagtcatttccgggatgatatgtgccagagggacttccatttgctctacacgctctaccattgttgttttcagccgtcccgaaggtgtatccgtcaaatatcccatagaaacacgcgttaatttatccgcaatcgcctgtcgtatttctgaaagcacatggaatgtcgcttcgtgggaacatctggtagagagcccatgaaaaacagacttcatcagataagctataagggcaacaattccccatgttaaataagcagaaaaattcgtttcacctccaatcagcagatttacgatccttgccacagcgaaatatggcacgataccacttgtgacgctgataacagcaagaataatagagagcaaaaagcctgattgatgcggtttaatgaatgtcatcaaatttacagaatctttttgtcgctgcatataattccctcctttaagttagcgaaatctaaccgctggccaaaagtaaaagccgacaatccacaggatttatcctgtaaatcatcggctctgcgtcttggcgtctggctctgataatataatgttttgtccctgcacatccacgatgtgttcttttccgcatttaggacaaaatagcggaaagcgtttgagaacagtatccggatttactttcgtgcgggttttgttgccgcaggtaggacagtgaatccagccatacctatcaatccacccgttcaatggttttcacctccatctccgaagaagatagatctccacccggcggtgtagaaacgccgcatcctttggatatgctcaaccgcctgatcctttggcatatcatggatgaccacctcgaacattccggtataaaaggcgctggacagcagatggcccagttccggcgtaagacggccactggagattgcgtcgttcctggatgcctgaatatagcgcatggtgcattggttgtccagctccacaatccggtggagaaattcctgatatgtattgttctctccactggtcaaaagtagcttgaactcgtcaaaatgatcgtagatatagtccacagaagcccaaaaccattgatcagagaaagaatacatttgactggtttgttcggttccaggcaactggttaaactgctgcaacgccgattgtatcataccacaaaaatcatccatggcaggctgtacaagggaacgatacaagctctctttgtccgggtagcgaatgtaaattgctcctttgctggagccggccttttccgcaatagtctgtagggaggctcgctcatatccattttttagaaattcttgcttggctgcttccatcagcttttccgttactcctgctacacgctttgccatagggtgcctccatcatttaaaaccattggtttcaatccaacggttttaatatagcacagcagtctgcaaaagtcaatagtctttctttgtttcgccataaattaaacgaaataatatgacattgagttgctggtatctacccgatttcagtctaaaaagctatttgagttatagatatgtacccagccgcctgtgcggctgggcttcttcttttttaggttgttaaaaatctgggcaaccatagcccagcacctcataatgtcccacggggtagctgttctgccggacggaatcgccggagttgccttcaatggtgtaaacgcgcccgttctccaccttctccacaatcccggtatgatcggaaagcccgtcctgcccattctcatcatcccagtcaaagaagataatcatgccgggggctggttccgcgctgttatccagccattggcccctatccttgaaccactgtacgccattgacgcacccggcgtatttggggattacgccggtatcaatatagccgcattcgttggcgcaccaggaaacgaaacaggcgcaccattccacacggctgtcaaaaccataccagctccagtacggttcgccgcccacgttccccacctgggagagcgccacggagacgatggccccgtcctcggtgtaaatgccgtagaggacggcgctccacaggctgcggttttcctcggccaaaagctcggcaagctgctctttctgttcctcgtcaaacccgtactgcgccgccatttcctcggcggtcttgtggctgacggtgatatacagataggtttgggtgacggtgctttctgtctccacgatattgccattgccgtcgtcggtttcggtgatgaccgtttccgtcctggtttccgtgcgggaagatatttggttcatctcccagaaaatatccgtgaggatggccttcttgctatcgtcaatggtggccacctcctgggggttatccgggtcggtggtcgtcttgacggcatagacggcaagcacctccggccagacggcgcgggagccggacatctccagcacgtcgtgggacagattggcctttgtggtgtcgatctgctgctggtaatcatcgttgatctcctgcaccacgttctgcatagtatagcccgaaccgctgtcctcaccggaaaagaaaatgccgaagcaggagccgatcaaaagcccgatgaggcagataatgacaatgaccagcacggcgatccagcccccggcagcgatggcggcgatcagcgccttggtggctgcaataatggctttcaccgccgcgatggtggccttggccgcaacctttgcagccgcaaccgccgcccttgccgcagcgcgggccgcgtgggcggcggccctggcggctctggccgtggcctgcgctgtccgctgggcggctttggccgcctgctgtgtggtcttgatactggccttggcggttttttccgccgtcttgatggatttgctggcggtttttaccgtccctttggcggtagaggacgcctgcttgatggtcttgcggcccctgtccacggttttaatgcttttctttccccgatccagggtcttgacggccccgcgctcctgacggagcgtccttaccggctcggagatcctgtccgccgcctgccgggttttcctcgccgcctgcttctcagcttgttttttcggctgtgcggctgcggctttccgcttctggatattctccttgaccttggagatgttctcctttgtggtctttatccctttgcggccctgcttgtcgaactggtggattgcttcatgggcgacgttatccaccccggaagaaaggcggtcggacgcatactcgccgggggagctttccgccgcatacaggctgtggtcggccttatccctggtgcggatatacgcctctttcatccgttccgaggcaaccgccgctttgtcaatggccttaattcctttttcggccacccttgttttaatgcccttgcccatgggcttcacctcctttccagggcgggcgcgcccttattcctccagcagctttgccacaaccaccatccgcccgtttgtccgggaatactcgcaggtggaaagggtgataagctggtcgccatattccgcgcttacgcccgtatcgtaaagcgccagcgccttgcactcggcaatatacccgtcaaaagccccggcgctctccgcattgacaaagtggtaatacttgaagccttcctccgagtaggccaccgtcttaaaggcggcgattacttcatattcgccaaagctgtccagagtatcaaagcggatggtcttgtgttcccggtaaaaatcctcgctttcatacttgcacaggtcggagaacatactgccgttgttcatgtgatggccgtacagcaccaggttgtcggaaatgccgatgtcgcagttttcctgcatatagggcaccccgtagctgctgtacgactgatcaaaggcgtgcttcagatagaaattggggttgtccttggtctgcataacggggtaatcgatccgggtgccgggaacggtaatccagcccaccaggtcgctgttctgggcgtacacatccgcatatttctcaaaagccgtaagttcttccggctctggggccgagtcatcggcaagttccagcgtgggcggctctacatcttccttaaccaaatccgccacttctgcaaaggcttcggcgctctgtttctggtcaaggtattcacgggccagcatagccccggagaaaaggaacagggcggcgcaaagggccgcccccgcgatcagtagtctgtttttaactttgtcactcatattttcaccctcctgtacttatcgtgcctgttctttactggccgcttggcggcgctgcccggcctgggccgatttcagcccctgcagctcggtttttacggaagatttttcgccgcctgctttttccgcaaggcgtcccgcgctgcgctccatctgggcaaaggttttgccgcaggacgtaaacagccctcgcagcctggcaagcgcgcccttgtcggcctccagtttctgggcctccagggcctcttttccagccagggcgcgcccggcgtttttcatgtggccgcccgcctggtgcagctcatcccggatcacatccagtttcccggcgcattgctccatcgcctggcttgcgtgggaaaaaccgcgctccatgcgggagaggacggcggggatacgcagcgcctgcaccgcatggcgcagggcggcgcgccccttttcctgaaacgtccccagcatacgcccggcagccgagacaaagtttgtcctggccgtggaaagcatggtctttccctggcggatttttccttccgccgtccccacaagctgggcgcaccgggcgcggattcccttgtcgtggagcttttccacctccaggcgcatggccttcatttcgtccatcatctgcgacagcttttcttccatgccgtcgatatagcccaccagggcctgtacttcttccttctgtttggaaaggctgttctgctccaatacggagagaagttcaataatctgcgggtgttcccgcagggcaagagccgattctgccatggttcattcctccattcaaacgtattatcgcgccggttccgcctgctttttcgcaggcggcagctcccggcagtattccgggtaacggattttcacgccctccataaagtagggagcaaactcgcagcaaaacaaatcctccggggagtaggcgttactgtgatccgggtcggtatagccgttccagaggttgaaagcaaggcggcacacccggacggtgccgctggtctgccagccgccgtgcataccatccgggtcaatgcagtcctgcttgaaatcaaacatctggcggatgtttgcccgcgtttccggggcaatccccatcacatagaaaaaggcccggtggtaacagtcgttcctccgggcctcgcccatcatatccaaaaagaaatcccggtgctccggggacgcaaaacggatattgctcatgcgggcacctcctcgccgccgaatacaccctcgccgggcttggtggtcatcaaagcgtaaagcctggtatcacggggaaaacggttgatgaacggtaccagggcgctgccgtaacggatcaggccgcagcccgcgtccgcattggtgacatagctcatctgctcattggagatattaaggagcttcgccagcttttcccggtcggatgcggcctggctcaacatcacaagaaactcggagttggagagcatggtgctggcttggacggaatccagcaggtactccacattctgggtgatagccgtgggataggccccacgctttctgaactgccgccatgcgctgttaaagaaaatgccgctttgctcattttcaaacatcacatggaactcgtcgatgaacacatgggtgcgcttgccccgtttccagttgagagtgacgcggttgaggatggtatcggtgatgacaagggaacccgcaggctttagctgttcgcccaggccgtggatgtcaaacaccacatagggcttgctcaaatccacggtgctttcccggccaaagatgtccaaagagccggtggtgtaaagctccagggaaagggcgatctctttggccttgtcctccggctgctccagcagcttccggcgcaggtcgcagagggtggcggcccgcccggctttctccgcctccgggtacaccagggcggtgcagcggtcgatgatggatttgtgctgcggccccacgccgcgcttgtcgatctgctcgataagggacatgacaaactggcttttttctacaatcgggttgttttccccgtaaccctccaccatatacatggcgtttaagcggtctttgccgcccgccaccagatgggccaccgtggccttttcccggcccagggttttgacgagcgcgccaaactcaccctccgggtcgcagatcagaatgtcatcgtcggcataatccgggtggagcatgaggaaggcgatcagctcctttaccgcaaaagatttgcctgcgccgggaacgcccagataaaaggccgactggttcaagaggttcgccttgttgcaaaggatcaggttatgggagatggcattctcgccaaagtaaatgccgcccttgtcctggatttcctgtaccttaaaggggatgaacacggccagggattccgtggtaagggtgcggaaggcgttgattttccgcaccccgatgggcagggcggtgcttaggccatcgagctgctggaacttgagcaccgcaagctggcacatatgctttctcgccacagaaagcaccgcctcggtatcgctgtcaagttgctccttggtgtcggcggtgatggccagggtcatcaccgcgaacatcatccgctggtcgcgggtggtgaggtcgtccaaaaactccttgctttccttgcgctgcaattccatatcgtagggaaccacagcagagaagttgttgttggcgttctggcggcgctgccagttggtgatgttggtttccacacccagcaggcggttttccacctcccgcacggcctcatccgtgggaaccggcacaatgtcgatggagaacatcagattgcggttaaaatcggtcagctccgtcaccatgttatccttaatataagaggcatagtctttgaggaacagcacccggcagaacttatcgcccagcttcagatagtcgctgtttttctcgatcccgtccgggcagatatagtccttgaagctgtggccccgtttcatcatctcgcgggcattgaacacaaactcggattcctcgccctggcggtagaagtcgtgcaggatgcgcaggcgctcggtggcgtccagctccacgcacttggaacccagggccgcaaagtgggaaatgaggtcggctcccacgcgggcaaagtaggcgcgggcctcctccacgtctttcttcaccacggaaacggtgatatatttttcctgcataatgccgttggccccggtggccttatccagcagcatttggttatattccccacggtactcgtcccggaaatccccctgtatgggcatgaggatggacgtttcaaagtttgccttgttcaagcggcggttgttgatggtgattttcgtcaccgcgccggaatccagggaattgagcagctccgaataggtgaggaacatggattccttgtcctcccggctggctaccaggtaattgatgtccgaaaagcggtaggttttggagaagcggttgccggtcaaaaaaatgccgtccggccagatacggcggacggggatcacatcctgcaccttccgtgggacggtgtatcgctccttttcctgcttggacatggttttgatggtcttaatcatgcttggcctccttccgtttgtgaaaatgcttcggttctttgggctgccgtttgacgggacgcccggtttgcagcccttcaatggtatctttcagcgccgcgtagtagtaattgctgtcctcaaacttaaactccttcggctccagcatttccgagcgcagccacgcccagatgaattgttccgccgtcatgccatggtaggtgacaaagcccagcatggcaaagggggccgcccccaaaatgcacatccaggacagggtttccaccccaaaataggggcgcagtataaagtaaaggcccacggccacgccgcaggcgagaacagaaaaaatgaactgccgcatggacagtccaaaaaacatactctccgtgtaattacggatttcccggttgatcttgacttccaaaatatcacctcacaatcacttcgccggtttccaggtaaacaatgctgctcttggggatataggcaaagcccagcagccggtcgcccacggtaaaaatctcgtctggagccgctttggagaagtgacccacaatccctttttctgcgggcaggtcgtaatcctccgccatcgggatggcggttccgtcaatcaagtgcagcacataggtttgataacgcatttgttttcctccttttttacaggcccatcatctcgcgtaccacgcggtcggccattttcaccgcgcccacgaggacgagcatattaaagaccagttccccgatatagctccatacctgcgtgactgccgccgcgttggggtcaatggcaggcggggacgccgcaaatagggaaaagataatgcaggccaacacgatgatggcaccttccaaacacacggcggcatagctcttgataaagctcttgcctacgttctgcgtcggctcccccgcaaaagtggagaggggaaccggtgcgatggccgtataaagatataatttgaaaaaacgcccgtagacggtcattatcataatgaagctgagaaccgtgataaacagtccgccgatgagcgtgaccgcccagagggggatgctctcgaaaaagccgcagctttccaccgccgtgacaatctcctggggaagaaccgtctgctgcgcggttccaaagcccgccgcgttcataatggtggaaacaaggccctggacgatattaaagagggccatcatcagctccagcccataggtcacgacgcctttggcaatggcaaaccggataaacagcttcagcgcgtgctccggttttttgacttccgcaaaactgccgcaggtgcgcatgacgcccaccacaaagaacagcaccaacagggcaaggccgatggcccttactgcgtcatggatgttgacaataacgccccaaatcgtgccgcctttgaactgctccgggctttgggtgatgagctgccagatctcagacaggtacttgttccaggtatcgagggcattttgtaagttctggactacccagttatcggacattccgctacctcctttccagcagcggtaagggacgggccgcagcggcccgcccccgcactgccgtattttcgcttatcgtccgccgcgctcctgcggctggcggacaatgccgtaaacatcatccacaaaataccgtccgacaaaggggttgaagatcgcgtggcattttacgccgcccacctcggccaggtagtcgttgtcccccaggcgtttgaggatagttgcctcacccagcacgttcttttccccctgcttcaaagagtggatatagcactcgcatttcagattcatagcgatactcctttccgctggaaaatcagcccgtaatgagcgtgaggatttccttggcaaacgtaatcacgacgccgccagctaaagtgaggaagccgttggcccgctggctggggtcgtggcttttcagggaaaggccgatctgtaccacgccaaagcccagcaggatcataccaatggcccggatcaggccgaaaatgaaatcgctgaggttgttgataaccgtgagcgggtcgctggcggcaaaggctgtggtagtgcagcagcacagcatgagcaccagggccgtgtaaacggcaaaggcgcttttgccctttctgcccatgggcaggctgcgggtttccttgttcttcttgttaaacagtttcattttgcttttcctccttgaattgaaagattttctccatgtcctcatcggacagaagttcacaaagggtttccggctcctggatattggcaaggtcgccgggggtaaggcggccaatagccatatccgccacggcgttttcggtgccgccgtgggaatagacgggcgcgccgccatcggtggtgtacttcacattcgggtgctttagcaggtcgtacttctcatccatcagcggcggctccccacggataaaaagcagcgccaggttgttgtccaacatacgcacctcatccggggtcaaaagctcgcggcccgtgatctggttgttggtggagtagctgccggagtgcccggtgctcttgccgtaggtgtccagccagagggtgcttttgcccaggtagttctcggagatcagcttgtgggtgctggtttcgttgccgcccaggtacaaaaactcgtcgcagttgcccatgatggattcccattgtttttcatacaacgccttgagctgggcgatgttctggatgatgatggacaccgaaatgttccggctccgcatggtggccagtagcttgtcgaagtcgtccggcaagctgacgttggcaaactcgtccatgaggaaatgcaccggcactggcaggctgccgccatgcacccggtcggcgctgtaaaacagctcctggaaggtgctggcgtagagcaggctgactaaaaaattgaagctgctgtcattgtcgggaatcagcgcgaacagcgccaccttcttttcgccgagggacgccaaatccagttcgtccgtggcggtaagcgcggccacgctggacaggttaaacttctccaaccgtgcggcaagggtgatctggatggattttaaggtcttggcgctgccggaacggtaatccttgtaatacttcaccgcgatgtggtcgggggagcgcatttccaggcgctcaaacagttcgtccagcggcgattggtagctgtcgtcgtcctcccgcacctcaccggcccggagcatttccattatcatcgcgaagtttttttcatcctccggcgcttcataatggagatagaaaaccagcgccatgaggagcatactggccgccgtgtcccaaaaggggtcgtttgactggctcccttttggggtcgtggatttgaacaggtttgtgaccatcttctgcacgtcgttgtcgttcttcagataggcgaagggattgtaacaatggcttttctccatgttcagaaggtctaccaccttgatctcgtagcccatccgttccagcaggcccccgcagtcgcgcagcagttcgcctttacagtccagcacaaagtaagagacatgggacgcctggagcaggttgggctttgcatagaacctgctttttcctgctccgctgccgccgcataccagggaattgagcgtcctgcggtgctttttcccgtccagccccatacggacgtgctgggtaaaaatgcggttttgaaacgggtctttatcccggtatttcttattcacggcccgcggatcgccccatttggcagagccgtgttcttcaccccgtctgtagttgcgccgggaagaaagataaatgcctatgcccagcccataggcggcaataaaaatgaggacagcttttatactgtcctcgcaccacacgatttggaatggatggttcattgccgcaggcagggcgtttacaatttccgaaaggcccccggaaagggacggcgcaatcaaaagggcaaaccagactaccgggatcagccccagggcatagagccaggagccgcccgccttgttatcgggcttcatcccggcgcttcgctttcctgtctttttgggatggggcgtcaatggtttttaagagcacatcttctaccgggccagggtcgcgctgttcctccagcagatcgttgcgcagctcgttgagggcgcggatcataatcccgtgctcgtagctgtccagggtgaggacaaccttgtcctgtcgttccatttttcaaaacctcctttaccgttcctgttccttctgcctgctggtgcgggtaaggcccatggcccttgccatgcgcccgttcatctccttgaaggtatcgcgcatatcggtgagggctgccggaacctcctccctggggtcttgtccctggagcacgccgtccagcctggagatgtcgtatccctttacatccacgccataccgctggcagagcatatagctgacggcgtaggctttgtagccctccgcctcgcgggaatagccctcatggctttgggcaagctgtacgttggccgcctccagggagacgcagcggaaaatgtccggcgcgtccatgcccttttttaccaggatggcgttttgctccgggtcatacacagccccgcgcccctggggcagttcctccaccgcccggatgggtacgggggaactggcaatcagcccttttaagagcaggcggtcgtcgtagctcacctggggctgggcttcatcccgcgccgtggtctgggaaatatcatagacctccttggcgtaaaagttctggcccacgctgccatcctcgcgccgatacgccttgcccggctctaaaataatgatgggcagccgtttttcatcctccagaacctcaatcccctgggattcccattccttacggccacccacgcgctgggcggcagggtattgctgcccgataaggatggcattgcgggccgagtggaaggggaaacggctttgcgtgtccaaatatgccttcatatcgccgcgcccctcggaaaacgccccgaataccccgtccagggtggcgtaggcttctttccgctgcttttcttctttcacctgccaccattgctttttcggcttttctgcctgcggctccggtttgcgggggactgtctctttttggggccgctgttcaaacagatcgtcaaagttattcatgaccgattacctctctttcgattttggtttctttctgggcttgggcggctggtgccgcgtggttttctgggccgcctttttccggggcgcagccggttcttcgtgatgaggggcctccgcctctttcttccgctgggcctggatttcccgaagctcctgccgcacggacggcttttccggcccatcaaaagtaccccttgcggagctgctgctgttctctaaggtaggcgcggacggatgggatttttccgccgctggggcaaaaggggcgttcttctccgctgccgggttctccggctgggctttttctttctgggtgggcttttccatcagctcgtcgatcagcttatcgtcctcgctcttttccggcgcggccttctctggggctgccggttcgccgccgcgctcctcgcgggatttctcaatatcctccttgatcgaagccgtatccaccaccgtgagcttgaacttctccacgatccggttggctctgacggcgtcgtcctggaataccaggatgtcgatggtgtcatcctctttccgcaccgggataggggcgtagagaatcccgtatcccttggcctgcctggcaaactccgggcagtcctcttttttaatggtatagaccttcaaagggcgtttctcccgcagcatggtttcaatgcgggctttgcccttggtctttttctggtctttcaaaaccgtgtaaagggcggcggccagatttttcgcggctgcgccggtgatcttgagggcgacttccgcgccctccaggctcatgcgtaccacttgctccgccgcgtcgcctgagttatacatcaaaaatcatctcctttcggttgggcggcccgcccgttccggctccagacggcctttttccgttttcccggcctgctgttcttcgcgggcggcccgtatcttatccttgatggaaacggagcgcagggcaatatccccgcacagcttcacctcccggcgcagctccttgatctgtgccgtaagggcggcaatctccgtccggatctgctcctgctgggctgggtcgtccagcaccgccctggtgcgctgtttccggtacaggcttttccgctgttccgttatgcttgaaagccgagattccacatcggcttgataggcattaagctgctccagggtgtcaatgcggtggcgggaaagcagccgcgcctcgtcggtaagttcctctgcccggattaaatcctcccgcagcgcgtggggcacatggcccgtctggcggttctgcttttgggggaacacccccagcaggtagcagtagtggaagtagagggcgcggaaccccgtcgcctttttggcctgtttcaagtctccgtggagcctgcaccgtttcggctccggcgtttgttcccgctgggggcggctctgggccagaatccgcctgcggatgttctccagggaatagccctcgccaaagttgcgcgcaagtttcctgccgtggggccggtcgtaggggcgcaccgtgatgtccttgcccaccttgacttcatagcccatctgccgcagatgataaaaaaactgccgttccgtcatcgactggcggatggcagcgtccacatcggctttgataagggaaaggtaagtggggcggccttcctgctcggcccgccattccccgtagtgcttggatttgcccctctgggggttttcaatgacggacaggccgtattcccggcacaatcggtcggattcccgttgcatggcaaagtagtccttttcgctgcggtaatacttgatcccgtcaacgaaagacacggtattgacaacaaagtggttgtgcaggtgatgggctttgtccagatgggtagctaccagcacctggtatttttcaccccacagctttttcgccagggcaaggccgatctcatgggccagctccggcgtagcctcgccgggggcaaaggattgatagccgtggtaagcaacagtcccgtcctcctttccaaaacgctttttcacggcgatcatctcgtcgcgggcggtggtggggcagcaattcaccccggagacaaaccgctgcatgaccggcgcgccttcttcatcgggcgcaatccggcctgttttttcctgccggacggcgtactcgattacgtccgaaaggccctgggtctcctggccgtccatgccctgcttttcaaagacggcggggttttccgttttatccgggttttccacatagatgagcactttccccagccagccgtttacccgccagatggacgtggtagccatagctttactccattggcctgggcaggatcacggctttggtgatgtcgcggacgagacggtcaaactttttcatttcctcatcgtagcggcgttcgtccacaacgcccagcacatgggctttctgggtgatctggtttaagttattgcccacaccgtgcaactcccgcatgaagtggtaataatcgggcggcggcgcgtcctgggggacgacgccgttaataagatggcgcaggtaaacctcctgggaaagcccgcttttgcgaaccgctttcataaagccctggtattctttgttgtcgagccgcacctgtacgcggcagtttcttttcctcattccttgtcctcctcatggcggcggttgatttgaagcaggcacatgaccagtacgccgcacacgccgcccagcagaaatccaatggcaaaaaacaatccttccatagaaaacctccattctttcaaaggggtattagggggcgctccccctaacaagcggtgtttgggcgaccaaacacgatgcttgctggtacatacacgttccattcccctgcggggaattgcagacgtccgaaaaaacaattcatcgtccatcccggtcgcggattcggcccctgggataaaactccacgtccttaaagctctccgcgtccaggatatattcgccgtttttccagttgtcggccactttctggcgggcctcctcgcggctttccgcctccaccgtgaccgtcatttccagcgtctcacggatggtaatgtcgtactctttcatcgttccagctcctttccttttgcgctgcggatgggaatccccagccggtggcagagaaaatcattgacgtctttcccctggggcggcgggcggtttttcatctcgtacccttcgggaatagccgccaggatggccttggccgccagcctgccggggccgtcgttgtccagatggagatagagggtttttacatgggggtgatcctccaaaaaccgggtgagggcggcgggcagcttgctttcctcgatctttttcttcggctggtaaatcccggccagggatagcaggttgtgccgccgccagtcaatcccgtccagcttgcacagggtggcgtaggacatcacatcaatgggcactcgcacagatggacagccgggttttccacgcaggcgggcagggcaaaggaatagtgcttgtcgctgccgcttacatccccgtggaaccgggcttcgccaatcccccgcaggcagccgaaccgcgccttgccatccttgtcaaagcccacaaaaaccacgttgccgtggcccttgttccggctctcataaatccgcccggtctggacgcagtagtccaaaatctcctggtctatgccccggcccgcaagatattggagcatggcccggttatccggggcgggcggcggcaaaagcaggtgcttgggctttttctcctttggggcgggcgcacgggacggcggctggatggccgccctgccgatgacggcctccatggcctccataaaagagcagcccttgactttgacaagatagtccagcgcgctgtatccgccgatcccatgggaaaaccagcaccatttgccgttggaaatccgcaggctgtcatgttccctggtacagtagacattgccggaaacgtggacaagctcctgcggctcgcaggtttgcaggtaggtgaataagtccacctggcgagctttttcaatctcctcctggttataaaaaggcataaaaaaatacagccccctttccatagccacagatttaccgcccgcatggggcggctggctatgtaaagggggcgatgtccttttcagatatgtagaaagccggctggattgctccagccggcacaggtgtcaacgctccagtcccaccaccttcctttccggcatttcttccccttcgtcggggccgtcgtccatcagcgttttgtctttctcatccatgttgagcaggatgttcagttctttgagccgtttggttttctccgccagctccgcctcgcgggcaaagggcgtttgcagctcggcgcgggcgttttcaagctggcccctggtttcctccaggcggttttgctcggcctccaggctgcctgcaaggttttccagggcgttgtccaggcgggtgatattgccgaatacatccgcgcccagcgtcaccgtatgggaaagagtgcctttgagggtgatccggtactcgttgctcctgccgtcgtaggccagcaccatggaaaagccccggtactgccccaaaagaacagcgtcggagccggtcatacgggtacagacgtcgatgatggccttgcctgcgtcctccttttcagcgtagtgcctgccgtccacctccatgccgcagaagccctcctgggccttggggtgggccgccgccagcgccacgtcttgcccatagccctcgattaactccgtgagccgggtgatttcctccgggtacttgcggtacaccagttcctccagggcatatacctggttcaagtggctggctttcagcatattcagccgcgccacctccatatccaggttgcacttttcgatgataagggggttgccggtggccagcgccttgatctccgaatagctgagggcggtttcatctacatcatccgccacacggacgggagatttgctggtcatgatctgagcgataaacttctgcttgttctctacgagctggtagaggtaagcgtcaaaggtgccctcggtgacataccgatagatttccacctcctcgttttcgttgccctggcggacgatacggcccagccgctgctgaaggtcggaaggccgccagggacagtccaggtcatgcagggcaatgagtttatcctggacgttggtgcccgcgcccatcttggccgtggaacccagcagcacccgcacctgcccggagcgcactttggaaaacagctccttctttttggcttcgctgtctgctgtgtggataaatgcgatttcttcctccgggataccggcgtccatcagtttctttttcaaatcatcgtaaacgctgaaagagccgtcggtggttggcgtggataaatcgcagaatacaagctgggcagagcgtttttctttggtctgttcccagatacggtacacgttccgggcgcagacagctaccttgccatccgggtcgtccggggccaggggctggatgagccgcatatccagagccagttttcttccatcgttggtaatgcggagcatattgtccacatgggggtcaaccccaccggcacggattttctcggcccgttctgccaacccctttatcatctctttctgaatctcggacggtttaatgacttccgtgtggaagttggcctttggcacaggcagacagagcatatccgccgtctggatgtccgctacccctttgaaagcggccatcagctccggcaggttataaaacttggcaaaccttgtcctggcacgataaccggtgccttccggagacagctcaatggcggtgacggtttccccaaagtttcccgcccagtcgtcgaaatggacaaggcccatctcctgtaacatccggtactgcaaataccgctggatggtgtaaagttccaccatggagttggaaatgggagtgccggtggcaaaaattgtgccgcgcccgcccgtcaactcgtccacgtactgggttttcataaacaggtcgctggatttttgggcttcggtctgggcaatgccgcccacgttgcgcatttttgtcgccaaaaacaagttcttaaaataatggctctcatcaataaagagccggtcaatgccgagctgctcaaaagtgaccgtatcgtctttgcggctctggtcgttgagcttggcaagccttgtctccagggatttccgggtgcgctccatctgcttgaccgtgtagcgttccgctttctgggccttggcctgctcaatcccgtccagtatctcctcgatctggcgctccagaatggcacgctggcgctcggcgctcatggggattttttcaaactggctgtggccgatgatgatggcgtcgtagtccccggtggcaatgcggctgcaaaacttcttgcggttctgggtttcaaagtctttctttgtcgctaccaggatattggcagaaggatagagctgaagccattccgccgcccactgttccgtgatgtggttgggcaccacaatcagcgacttggtgcaaagccccaggcgcttcatctccatggcggcggccaccatctcgtaggtcttgcccgcccccacctcgtgggccagcagggtgtttccgccgtacaggatatgcgcgatggcgttcacctggtggggccgcagggtaatctccgggttcatcccctcgaaccggatatgccgcccgtcatactcgcgggggcgcagggcattgaaggtttcgttgtaaatgcggcatagccgttccctgcggtcgatgtctttccatacccactcggcaaacttctgtttgatgagttcctgcctgtcctgggcgatggcggtttcttttttgttgaggacgggttttttgttgccgtactcatcctcgatataatcgaacacccgtacatctcgctggtttaaggtctgttccaggatgtggtaggcgctcatccgcctggtgccgtaggtggtattggccttgacgttggcccggtcaaagttcttctccgtgatactccattgcccggtagcttcggagcgcaggattttaatgcggcttctggcctgcccgtaaggggtaagcagctccaccatgaattgctggtacacgtcgatgggcacccagttcgcgccaatgcgcacgccgatctccccagcgcctaaatcctgtggctggacggcctccaaagcctccacatttctgcgggcggtttccttttgttcatcaggtactgcctccagaaaggcttttgccatccgcagcttctggcgcactttcccggaaaggtactcgtccgccgtgacaaagggatagcggctcagatccgccagggaaggcaggatgtcctccgggttctccgcgcagcgaatatcccggtagatcaccccggcaagctccttttccagttcctccggggatttccccgacagctccgccatatagtccatgtccacgcgggctttttctgaaatggacaccgccagcgcctcgctggccgtatccacgctggtgacagccacatggggccggatggtacgccgggagaacatatcggcttttctttttaggccgccctgctcatccaacacctccaaagagcagagcaggcaatagctggagtcctccgaaaaagccagcttgttgccccggctgttgataaggccgtatttagcggtaaagctgtcgtaaagagcattgagcttttgctgctcggctgcaatctcctcgtccgggtagccttcggtctggtactcaatgagcctgcggacacattcccgcagctcgatcatgccacggatacggttttccgccgtgacggagacttccaccggatgcatgaggctgttttcccggtagtacacctggccgtccgtaatcgtataactaaagttctttacattggggtcggcggggatggatttatcttcctcctcgtccagctcctccagttcgtagggcttgatttccgcctgcaaaaactggacggcattggcaagctgctcggacaaatcttcgccctcgcgggctttgcaggcgctgtccggcccgaaccgggtggattccatcaccatgtcgcctaaaatcatctccgggtgctgcacgaaatagcggttcatgcggattccgttttcatccgtgtccaaatgcacccaatccggttccagatcggtgatgtggtcgcgcttttgcaggaaaatgacgtcgctggtcacttccgttccggcgttccgcttgaaggtgttgtccggcaggcggatggccccgatgaggtcggcgcgctgggcaagatacctgcggacggcggagttttccttatccatggtgccttttgaagtgacaaaggcaatcacgcctccgggccgcaccttatccagcgcctttccgaaaaagtaatcatggatgagccaatggtgcttgtcgtatcgcctatccagcatcttgaaatccccaaaggggacgtttcctacagctacatcaaaaaagctgtcgggcatttgcacggtttcaaagccgtttacggaaatgctggcgttctggtaaagctggcccgcaatccgcccggaaatggaatccagctccacgccgtaggctttgctgcccgccatatccgcagggagcaggcccaggaaattgccggtgccgcaggacggttccaggatgttgccctgggtaaagcccatctgggacagggctttgtagattccccggatgaccacgggcggcgtgtaaaaggcggtgagggtgctggccctggccgccgcgtattcctccgaatccagcagggatttcagctcctcataatgggggctggtttcctcaaagcagtccgcaaggccgccccagcccacatagcgggacaggatttcctgttcttcgggcgtggccagccgttcctccgcttcgatctgcttcaaggtgcggatagcggcagcattggccgcatatttctcgctgggggcgccatggcccagggcgtcgtcggtgatgtgaaaatcatggcgctgatccctgggaacctccgggtacagggttgtgaaggtaatgcgctcacgccgggggcgtttgggcggcagcggggccggttcttcttttttaggctgtaaaacgtcctgctccgggctggcttgcggttcctctgcggcaagcgccgcctgatcgatggcccgttcatcggggaagtccccgtaaacccgcagccaccggcgctcattcaaatcgtaaataccagcgccgtcataggcaaagccgtcctcgccctccatggtgccatctacatatttccgcgccgcctgttccgcctctgccagcgtttggtaatccagccgttcgtcaaagccattttcaaagtggtggtacaccgcaacttcgtagggcggctccatgcgctgggcgtagcggtcgatgtcctctggggttagccattccggtttttccggcagggcggcgtagagttcccgcattttggcgatctgctcccgcacgttcccggcccacaaatgcttttccgcacgtccgccagcgcccaggaagtagtcgcagtcggttttgaggcggcccagcaggcggtattcatcctcatggccggacggcatggcttccgcagccggttcttctgccaacagctcgcgctcgataaatccggcgatctcccggctgtctcccttgccgccatgggcgtggtattcggcaatgccgtcctcgatcagttcatcggacgccgcatatccggcttcatccagatgggttttgatttcttcccgcagggcctgctccggggtaagggccgggggcagcgcctcgatctgctccaggcagagggccgcatccgacgcgatttcttcctccgggccggcatggtcgaggaaagagcgcagcaattcatggattccctcacgctgcacggggtcgtggagctgccgggcaatattctccaccgcctgggcgtcatcctcgccgtagtccatacgggaaccatcaaactcgccaataaggcgcagcacctgggcggccagcgtaggataggggtctggggcttcttctttttggggcggttcctgtaccctgggcggcacggcgaacaccggcgcgtcctgggtagcggaaatcgtcatttccgaggtatccgccacccgttggatttcctcccgcaccgcctggggcatttcctcatcataaatcgttaccgtgcggtcggagccgatgtgggctactgttttatagtctccgtgttcttcctccagccggttccagacggtgaggccgttccccaggtagccatagcccaggtcgtaggctttgaacgggggcgcggctgtggccgcaggctccttgtgttctgcaaagagggtaaacgtaccctgccggaaggcggtgaggttttcaaaggctgttttccgccacttatacatccggtcgccctgcggggtggcctcccaaatgggaaccatcatctggtagatttcctccacgcgggccgggttgtcaagctgcggctcgatgaccttcactgcgtcccaatagtcgaagctaaacggataggggtgcggctgttcctggggcacgttctcaaagaacgtgcggatattccgggcaagctggtgcttctcatactgcggcatggcggcacggtcgtcctcggataagaaccgcccctgggcgatcatggcgctgacgtgcttttccacggcgctccatttcagctccaccttggcgtagggggcggcgatactgccgtggctgaaggaaacgcctttgctgagctggtaggtcacatcgtcgtttccgccgccatatccgctgtattccccgtggtagtgctttagaaaatcctcccgttccttgcggtctgtatggttgcggtaaaaggaatacacggccagccggtaatctacgctgcgttttccgccgcgcagaaggttgtcgatctcgtctgtggagatatacaaacgccgctgggggtcatacccctcggcggcggtaaaatgcagcggctcccgctgtaaatctgcaagctgggcctggagagcaagcggacggtaaaagcggaaccgcagaatagccgggttttcctggtaggcggcggcaaaggcttcatattctgagaggatggcctgtaagccatcttcccggctcaaaagcccagcgatttcttcagacgcctccgggaacccgcctggtttatcatagacggcccgcagcgaggggaaaaaacgcttatcttcatcctcaatgtcgcggaacatcagcagcagccggtcggccagcgcattgacttcatagcgatccacctggtcaagttcgctctggggcatataccggcctaaatccagcagttcccggatacgggccgccgcctgttcccaggggatgagggcggcgctggaacgccgagcgctttcaccttcggcaatgcggattccctcggcgttataccaaagggcatactttttgccgttcagataaaagcccgcgccgttctcgccatagtgctccgccaggaatcgggcgttgtccggcttatcttttttgaagtaggcgcagatgatgaggcggctgtgcttgtggttggagccgatacacagcgcctcgtcgatcacctgctggggcagagccgggtgaggaaaaacggatggctgcgctgcgccctccgtccgggctggctgctgaaacgccgcaaaatcaaaaagggacatctgctggccctcctggtcggggagctgcgggatgtccgtctgaataaagtattcttttttgtcgatgagcttagccgtccatccggctatcaaatcccacgaaaacaccgattcctttgtgcgggaacggtaagcgccttcccacatgagcagcccgtcctcctgggggctatatcccaggcgctgcccatcagcgataagctcggtaaacctgtcctggtaggcggatttcagatattccgcccgttcctgctcatccgagtggacggaaaagaaaagctcgatctgctgttttttgtacttcaggtcgtcatccttgttggcgatgacggccatgatctgcttttcatccaaaagcgcagggagctgttcgccgcctgcgctttcttccggttcatcctttaattgtaaatcagctccgccagtaccgtttcctccgccgcgttctggatgttgttcatcagccccacccatttcatcgggtcgcgctctttcagttcctccgtcacgccctgggccttcgccatctgcgctgcgatttcctccatccggcgctgggcgctctgctggatctccgccagatggctggagagtttcccgctggtcaacaggttcgtgtaggtgatcctgcggtgctccttgaggaaccgcctccgaagcaatgcgtatttcccatggggaaccggctcctcctggggcggcagaaggttcggcaggttgtagtcgccctgtctcgtgtatgtgatctcggccatattcaaaactcctttccggctgtgtggttttctgttcagttacagcatactggatttgccgctgggtttcaaatgtgcgattttcttttttcggctgtctttgcagggcaaggacggtacgcgaaatcgcagaaaggcacatttgggaaatgtccccggcagccacgcccaaagcgttcagcgtctgcggcgtgttaaagtcggttacatcccggaaatcctcatcttcaaaatattcggatgggtcaaggccgcagcgcaccagcagcatatacccaatgctgttctgcaccgccctgcggtactctacctccagattcagcccgtccagttcttccaggaagctgccttccgtaaggcttttcagttcagaaagatagtcgggcatattgtcctccacggcgttctttgccgcagagagcagggctgcgcccaaatcttccttgtgttccagttccccaaagctgttctccagcgtttcaacgatgttcggcgcgtattcttcccgcaccgtccagatagggacaggccggggaaaacgggcctcgtgggtatcgtaaatgtcaaaatagtatttcagccggggtttgccagtatgctcgccgtcaaaaacggcaatgccgtttgcgccccggtttacccagcgcccaaattgccggttccatcgctcgatctccaggacggcggtggcgtccgggcgctgggcgtaaactaatagctgttcatcaaaagtcaatcggtaattgcggcaggcagaagccaaaaacgcctgccactctgacggagccgtcactttgcgctgcgtttcccggtacagctccgttagggctttatataatatcgccatccggcgcacctcctttttcttgttatctttccaatgtcgcagcctgccgctgccggggaatcgaaaaaccgtagaccttggcgatgtcgtcgcccagcctgcgggtcactctcgtaatatcggcgcgggtcgcaatgccgcggtacaatttttctttcagcagttcaatttgggaagggctggcgctgtccttgtaaacgcggtagaggtagtggtttgtgccgtcgtggtggatggcgtcgcaccgcaggtcgcccaggcggtctacataccatgtggaatagtccgtatctccgtaaaggcagtcccggatgttgccgctggggatttccttatatcccatgcgccgcccattccacaggcccaggtcgcctacaaccaaaatgggctgggaaagctgcacattgagattggcgcgttcatcatccaggtaatccccattgatctcatacatcagggaaatgcgctcatcttcggataaatccgggtaatccgcctccagatcgtcccgccagtcctcatagtccaggccgtagtctgtccagataatgtgccgttcttccttcatcgcgcctcaccccggtctttccttttgggaagctgcgctttctccgccagcgttttttcccgcgcctgccaatatgcggcgtgaaaggtttgcaggctgtcattgataacagcctcatacgcgccgggggcaaagcgttcgttgacaggcgcttggtacatccctttatccatcaactcccgcagcgccaccggctcgtcgcagtcctcctcaaaacaaagatacgcgccctcggtaaatccgcagtccagcgcttctttgcggaatatcttttccgccagttcccggcgcaccataatgccgccgtgccctggggtagaaacggaataaacgccggggcagagcgtttcgcactcctgtacgttcccccatggggaataaggcggagcctccggcgcaatggcgtcctgccgctgttcttccaggcactgtacttcttcttgcgcccgcgccaccaaatccttttgggcggaaaacaggtcgctgaaataatggccccaataatagtccttccggtcggtgcatttccaggtaacgaattgctggggtgctgtcaaatggacgcccagcacaaactcgctgtcgcccacatggcaggaatccgtaatgatatatcccgcgttctctctgtaatccatcatcaaacctccgtttcattcagaataaaatctttgacttcctttatgctggcaaaatcccgttcatccccggtaaggtagcgcaccgcgtcctgccattgggacagcgggtagccgttctcatccatcccgcacaaatcggacagggcagccctgcgcaggaagggggtgaggtttaagtcggagataaagcagccatgccgggccgccagtatatccagcaggtgcagttcactcatggccgcacctgctttccccggcttctttcagcaattcctccaccagtctgccgctgcggactttattccggtctgccagcaccttgttctggacgcacagcaccgcccggatgttggggacggtaatgccggggatttccaccatctcctccggagtgatggtgagaagctgcaccggggagtagccagcctgggcaaagatacggaacagccgctgttcaaatcgttctttcatctgcaaagctcctttcttttttggtatgtaaaaggggcggccccgcatggccgcccctggctggttacttcttccggcttctgactttcaggaaaatcaggccgccgatgatgaataccaccagcgcaatggcaatgatcgttttcaattccatgaaatcattcctcctaacacagaatcaagccgcagttatttcacggtgtttttgcccttcttgcgcttgcccacataggccgcaacgcccagggcggcagcgcccatagcggacacgcccatgagagccgcccacagccagggcttgctgtcatcgccagttttcggggtgtcgcgcagctcgttgtgcatttccgccacggtggtcttatccgcaaaaatcgtcaccgtcttatccgcaggcagcacatagttggcgctggccccatccgacacctcggacacggtgtaatcgcccacgcgcaggccctcgataaagatttcaccgttcgcgtccgtggtgaaaatctgctcataaccgttggctccggtcacgcggaaggagaagccctccaccttgccgtcgctggacgttttttcaatccgcagggagccagtctgggccatgttggtgaaaccaaccccggcctcgttctctacctcgtagatcttgccgttctcggtgatctccacataataggcgttttcatccagcaggaagccctccggcgctttggtttcccttacgaacacgccgccgtagaggatgtgggacatctcgtaaatgccggtgctggtttcctccagcttgcccagcagctcgtcaccctcgtccagctctttgttgccattggtatcgcggtacacctcaaactcggcaccggtgagcttgttgttgggataatccttatccaccttggtgagccgcagatcaccatacacacgctcattggcaagggaaatctctacaacctgtccatcttcctccacagtaacgggaatcacttcatcggagaggatgaacccttccgggctttccagttctttcagcacccaatcaccgtaaggcacattggtgaaagaaaagctgccgtcgtccgctgaggtagtggtggcaagggcgttttcggcggtaaactcggtttcatcggacttaaacagaccgattacagccccgcccaggcccgtgccgttctcatcggttttgaggcccttgatttcgccgcggatcagctcgtttgtgacagcctcgccatcattagcggaaatctctaccacggcaacagaaggcccgccgtactcaaaggtgaacgggaaggtttcgccattcagcaggtaatggctgtcagtggaaagctccttcaggtagaagctgccgaaaggcaggtcggtgctgcaaacggcctggccgttctcattcacagaaacgatctccagaagcccgtctgccgagatcacggaaccgtctgctgcggtgatgtcctcctgggcatagaggccaaaagttacggcggagatctcgccattcatgccaatgccaaagatttcatcctgctccagcaccttgtcaagcgtcacaagggctttctggcgctggttgtagaagctggcagaggtttcggtgacttccacctcctggcctgcgtacaccagctccacgttggtgacgttctcgccggtatccaccatgccgtgagggaactggatttccttcacctggaacttgcccaggtagaggggctggctctgggctgtcccgtcctcgccggtggtgatggtgtccactacctcgcccgcagagtagcgcagggtgccgtccagggtgtagacgtcctccagggcggtgatttcaaacaccgcaccgggcaggccctgcacctcatacaccggctggtaaacgccctcgttttctgtcacagaggaaaatacctcgccggtcttgctgactttgatgattcctttttgggccatgttgggcttggtgacttcgatcactgtcacgccgccttcttcgctggaattgtcctcagtcacatcaaagtaaaccggggtgctgtccagcacatacccgtagggggcctggacttcgaccaaggaatatcccgtgccgtactccagcttttccggggtgacaagatagccctcggaattggtgtagaacgtatcaatggtggtcggcgtcggataggtgaaggtcatttccaccttgctgccatccgggcggtaaatctggaacccggctcctgcatagggaatggtagcgccggtttccgcgtccaccttgaccaccttgatgaagctctcaaaattggcgttgttgatgaggtagcggtaggtctgcccgtcctgggcgatatacacttcaaagtcgtccatcagctcgcggccttcccagcccttggtctggcggacgatataggtgccgtagggcagcttcttcgactgtgcaaatccgttctcatcacagacgaggacatcgcgctcggattccctggcattttcatagctgcccgcagctttcaagaacacctggaactctgcgccggattccggggtttcgatctgggtttccccgtcatcggtatgcttgatgatggcgatgtcgcccttgatgatctgctccgtcacgtcgttggcggtatcgttcagctcaatctcatacagctccggctccgcacccaccttgtggatggtggaatccagcaggtagccctcgctggggctgatttcacgaattgtccagtccgaatcgcagacgtaatagccggtggtaaactggccattttcgtccgtggtaaagctgtcaatgagggtatctcccttatacagcccgtacacagcgccggccagggaaccatcgccctggggcgcgcccgtttctacatcgctcttggtgacggtgacgcggaatttcttcagcacgttgttcacgctcttgtgggtaacttcattccactcgatggtagctgtctgggaatccggcaccacataacggatgggggtatccacctcctccagtacatagccggagccgatcaacacgttttcaaaacgcgccacactggttccgtccgtcaccgcatactcatccaccggctgcccggagagggatgtgccgtacagatggaaggtcatgccctccaccagcccgtcctcgctggttttcgtcacttccaggctgccgcgtttgaggacgttgttgaaagttacggtggcggtctggccgctgacgatggtcacgcgctggctttcctggggttcatacttgtcaatcgactgctcggttacggtataaacgccgggattgaggtcggagatgtcgatctcgcccgcctcattggtggtcttggtggcgctgtatccctcgccggtaatggtgaagctgatcccggctacctgtccatcctcggaagttttaatcagcttcatattgccggtcggtgttcccacatccaaatgggcagttacccggtcggcattttccacgccagtcacgacatcctgcaaattgggatcaccataagcaatcagcttggcgctctcgcttactgcggggatattatttcggctggcggtgatccgcacggtgccgctgatggcatggtctgtactgattgtcagcgtattgccggactttgtaagggtcacgccgctgtcggagctggtgaaatcatactccgacagcactccgttggtatcggtcagggtcgccgtgtactttccatcctgatagtccagatcaatactgccgccattcataaaactggggacagtattgtggcgctgaagcagggaaacgatttggtcataaacggccctggccccggcatttggatggttttctccaaagtggagcgaatatacggtggaatccaactgttcaaaagaaccggtagggtttcggtagcccgtcacaaactcccataccagcgtctgggtggcaagccactgttcatcgtcattccctgaaagattggtgctgttcccctggcgtccgtagagcagcgccagcccaaccgcttttttctgagcgtctgaaagagcgttccatgtttctgaagaatcttttctaagagtgtctcctgtattcagcggaatgctcggttcgatacaatatgcggtatctccatccacatacatccggtttttcgcgtgtccggccccgccgaccgtgtttccgttgatgactgccgaagtattataatacatacggtttccgttggaatcataggttccggtaaaggtgatggttcccacttcttctgtagcggcaaatgccgtggtgcccgtccctgcgaatatgcccaggcacatgagcatggccatgaacagggacaggggctttctcaatgctttcatcatttacctccttgaaatggccgcaaaaaaagcacaccgtttccgatgtgctgcggcttgtgttggttactgtctaaaaaagagaggcccgcccggtttccctcgcagcccgatgtctgcctgtggaaaagaggccggagttttctgaacatccaggctccccaaatatcttcttttttaggctgtttaggttgtttggaaggggtgaggtgtggagagggggaaccggcacaagctgccgtttccccgcaaatgggcgcacctcccccttgtgagtgggctatctctctaaactgcgctggcgcttgcggtagagttccagcgccttgacaatggtgtcctcgatcttctgcgtgggcgtccccggcgcaaaaaaccggctgattttttcttttgggattttgaactgttctttttgattgggcttttcctccttcataatggaaacaagggcgtctttggccagccgttcatcgccggtcttggcttcggacatctggcgcattttgatggcctgggcgtgggacggggtacagtccatctcgtccatgatagcgaataagtcggcctgttcttcttttcgcaggtaagacagctccaccgctgggcgcatggcaatctggagcatagccgggtctttgagtaccgagttatctaccagctccaggatttccgggataaggtgggtaagacggatatatcgctggatttgtgttttactgtccgggctttctgcggctaattccaaattagagcgcgtcccgattaaattcggccccagtggggccgaattatcttttcttggccgaccagcctgccgtttcatcgcgtccagcttcattttgtaggcaaacgccttctccgagggcaggatctgctcacgctgcaagttggaatccaccatgataatcgtagcttcatcatcggtgagctgccgcacaatacaggggatttccgcaagccccgccaaatccgccgcttttttcctgcggtgtccggccaccatctcatagccgccctccgatttgggtcgtaccagggtaggaaccaaaacaccgtactgcttcacgctctccgtcatttcctgcatggccgcgtccatccgcaccttaaaggggtgattgggaaagtcgctgatctccgcaggagaaaggttgacgactttttcaagccttgcctcagcccgttcttcctccgtggaaaacaaatcatcggctgagggaagattgaagtttagcgcgctgtttctcgccatccgccaacacctcctttgaaaactccgcgtaagcctgggccgctttgcttccgttgtcgtaggcgtaaatactcttgcctgctgcgctggtctctgcggctttgatggctacgggaatctcggaacgatagatttttaatacgctcccgtatgtctgccgcaggatttccgccgtctggcgggccagattggtacgtccgtctaccaaagtgagcagcaccccgtccaccttcagggccgggttaatccgcttttttacccttgcgatatttttgataagctgggtcatgcctttggcgggcaggtagtgggcctgcaccgggataatcacgctgtccgccgcagccagggcgttgatcgtaatcatacccagggacggcatacagtcgatgagcactacgtcgtaatttttctttgcttcgttgacataggtgcgtaaagtgatctcccggctcatggcgttgacaagggtggcctctaaatctgacaattcaatgttggcaggcatgaggtctacgccttcgctgtggtgtaaaataccctcgtctgcggtaaaaggctcgtcgcggatgatctttcccatgacggtagcgagggtggtctgtaagctgtcctggtcttgccagcccaggcaggtggtaaggtcgccctgggggtctgcgtcaatgagcagaacttttttccccagacgcgccaggccaatgcccaggttcaccgtcgtggtggttttgcctgtgccgcctttctggttggccagcgcgatcacgcggctatccctggggcggcttctttgttccggcattttcatgtcctccttcttcatagatttagccgcccgttggcaggacggacggctatgtacgcggaaaatccgaaagatgggcatgaaaaaagccgcttactctttctgaaaagaataagcggctcattaagcagcgatatgtaattttacatcttcttcaccggggcgcacatcactttgagcagaagttcatccaggcagccggtgtccctgttttcccggagcagggcgttacgcaggtggttgaggctctggatgacgatactgttttccgtaggggtaagaaatatctttaatttccgctttctcatttgacactcctcctttgtgcttctattatatatgtaaggaaatagtgccgcaaatgtgcgattttcaattaggtagaagctggatggcaaaggtatgtatccacatttacctttagctttttcagtgcggcaaggattttttcatactctttacggcgcggaacgcggatttccctttcccagccagaataagacgtttggcctattccaattacctcagccatttgcatttgagttagggaaagttcctgccgtacctttttcaaaagagaggaatacgggtaatctacaaaggcggtatatttgtccagaagcctgttgcggtcaatccccagcgcatttgcaagtgctaccgctgtgctgtgcttgatggggtgccggtcattttcatacagaaccaatgtcgcgggcacaataccaaccttttccgccagttcccttgtggtgaagccctggaatgtccggtgatacttcaaatattggcccggtgtggtgcatttttcatcggttttatagtcaaaggtcaaatgaatcatgattttgcctttggaatagaggtaaatccctgtgtgattgagattactatcggtaagacaatatgatatttgcacatccattttgtatgtgcgagtgaatattctttcttcgccataaattacctttcctttctacaatatagcctgaacaactttattgtacacggaaaggtaatttcttttgtataacaatcgacgcgcacccgcatagcgggtggtttattgtttcgtccatctacatttttcggatcaacgaaaaactccaatggactcaacagactaaagtccataaactatgagaaacacgctccgcgagtttctcaagttatcgcgacagtcgccaaggtctcgtgcaagcacggactttggctcgttgttcgcgtaaataaaaaagtggaagtctgtcaatgttttcagtccttccactcattttcattcatttatcttattaattctctccgggtttattttacaataccaaccatatcttttacattctcaaagccattcttcttcatataagcttcgattccgtcaatcacttccaatgtcactgccggattgtggaagtttgctgttcctacagacactgcgctcgcacctgcaagaaggaattcgattgcatcttctgcacaggaaattccgcccattccaatgattggaatattaacagcctgagcaacctgataaaccatacgcactgcgactggtttcacgatcggtccggatactcctccggtcttattcgctactgcaaatgtctttctgttgatatcaatcttcattcctgtcagtgtattgatcagagacaccgcatctgctccaccggcttccgctgcccttgcaatctccgtgatatctgttacattcggtgtcagcttcataatgatcggctgctttgcgatcttcttgatctgtgctgtcagcttttctacattatgtgcatcctgtccaaatgcaagaaatcctgcattgacgtttggacaggaaatattgatctccatcatatcgattggttcatctgcgagacgctctacgactgcaaggtactcttccggagcatgtccgcatacatttacgatgatctttgtatcaaaattcttcagatatggaatatctctctcgcagaacaaatcgattccaggattctgaagtccgatggcgttcatcataccgccataaacttcagctacacgcggggtcgggtttccttcccacggtacatttgctacacctttcgttgtcactgctccaagacagttcaggtctacaaattctgaaaattcttctcctgaaccaaatgttccggatgcaactgttaccgggtttttccattctacaccggcaatatttacgctcatgttcattagatttccacctccgtagacaagaatacagggccgtccttacagatacgcttgttgtttacattgctatgtgcatccttttctttcgatttacatacacatgccagacaggcaccgattccgcatgccattctctcttccagtgagatataacactcgattccgttctcttctgcgtactgtttgatcgcacggagcatcggagtcggtccacaggcatagatcatatctgcttccagagcattttcacggattgcgtccataacatttccctttgttccgacacttccatcttctgtggaaatataaagttctccgctctgctcgaactcttccttaaggaatgtctgtgcgtcgcggtatcctactacgatctgtttcttctcgcagtccatctgtttcgccagttcaaggatcggcggtacaccgattcctccgcccatcagaaatactttctttccttcagccttctcatatgggaatccatttccaagaggtccgatcaccggaatgatatctcctgctttcagcttagaaaattcttctgttcctgtctttggtcctgtcacacggtaaacaacacggagtcttccgttctctttatcaatctcacagatactgatcggacgcggaagtaatttacttccatctgttgtatacatagaaataaactgtcccggctttgcgtcctttgccgcctctgtattgatccacatgctgtagattccatccgccagctgctcctgggaatgtactactgcattttctttctgctttgccataaacttatgcaattcctttcttgaaattatgagaaacacgatctgcggatttctcaatttctatggtaaattattttgccgctgcaagtgctccgctgatatcagctaccattgcttcaactgctgctcttgatgcatcaccgaaattctccggtccgaacttcgcataagcttcctgtttgtaagctgcaataattccacgggaagagtttacgatcgcaccaagtccgtcttcgttaaagaaatgaacaaggtcttttccctgtccgccctgtgcaccgtatcccggtacaaggatgtaagacttcggcatgatctctcttaatactttacccatctccggataagtagctcctacaacagctccgatatagctgtactcatctcccatgcagtcagctccccactctgcaaccttctcacctacccactcataaagcggtcttccatcaatgattctgtcctggaactctccactggacggattggatgtcttaacaaggatgaacagacctttcttctcttccttgcatacgtcaacaaatggattcactccgtcagatccaaggtacggattcactgttgcaaagtcctctccgaatggtgtatattccttgcttccaaccttaatctttccaagatgtgctgttgcataagcagcagatgtagaaccgatatctccacgctttacatctccgatgatcacaaggtctttagacttacagtaatctactgtcttcttaaatgccatcagtccaggaattccgaactgctcgtacattgcgatctgtggttttactgccggaatcagatcataagtcttatcaacgatctccttattgaactgccatactgcctctgctgctccttccagagtctcaccatactctgcataagccttgtcaagtacgtgctgtgggatgtagttcagcattggatcgagtccaactacgatcggtgcacctgtctttttgatcttctctaccagtttattaatcattcttcattcctccatatcctgttacttttcatcggatcaccgatgaatgataaccttcggtctttccttcaggttgacgcgttacttttctttacgcacaatatgatgtaagtgtcaaaagtataaattgcgtttgtgctcgcacaaataagcaatttatacttattgacacgccgaacaccgaaaacggaataaaatggtgtgaacacgccattttatgggagtttgaggtgttcgaggattgcgggaattgcatagcaatggagcaatccggttacatcagtgagtggcaaaatttacttttgacacttacatcacaatatatcatttttcataataccatattcttgagaattttcctagtcatgctttttaataaatcaaaaaatgaaaaatgaagttctttctctgtcactcatttaaacagaatctgaaagaacttcgtttctctgattttattttttaatatcccgccggcacaagcaatgtaaatggataaatcggaatatttctcacgattccgaaccccaccactataactaataccacatataggactttctgattaatcttctgatccacatgattaccaccggtcaaaatccagtcaatcaatcgtgctacaatatacatcccaagaaacgggagtaatgtcacatacatcggattataccggaatgccatataaaatcttccatgtaaaatagaatagcttgcccgcccggcaccgcaccccggacaatacagtccggtaataatatgaaagaggcagggcagcggatactggtgcggattatgaaaaaagagataacccgcagcggccactgcaatcactgcccccgtcagaactgcgatgatcctggctgacctttttgtttgaaatgcttcacgcatctttatcttccaaatcatcatccgctcactttttaataatagtaataagctgaaccggaaactgctcctgtcacgatcagaaccatgtagatcaaccatgtgagaataccaattgcaaaggatacgataatccagattcttgccatcttcgcattattctgtgcttcttcaagatttcctgccatcatagcactattgatctttgctgagaacacgattcccactacaccaaacgggagacagcaacataatgttgaaataatcgataatataagatatggaacccagttcactggcttctgtggcattccattgaaattattctgctgataatatccctggttctgctgaccatagtttggattctgctgagtataattcttattctgctggttataattctgattttgctgaccatacccctgtccatactcataattgtttgattcaccataggaagtattctgctcctgattcaaacttttgtatggatcactctgatatgaacctgccacatcctctggctgtgttggttctgtcggctgcacatcttcttctggctgcactttttctgccggctgcacatcttcttctggctgcactttttctgccggctgcacatcttcttctgactgcactttttctgtcggctgctgtacctctgctgtatcttctgttatgttatctattgtctcttcctttacctgtgatacaggttccatcttctgtaccggctgcttcgccccgcaattcgggcaaaacttacaactatccggtatctcctgataacagttcatacatctcatcatctctacctcgctttcataagtcacaattctcactttcccagagcactgaccaatttgctcacttgttcgttttgcgactttatttcttatatcataacattaatatcaccaaaaaacttgtatcttcattaaaaattaacacttttcttttcccaaacggatttcttccatctgttttgcagtttcctcatcaagataatccagaagataatttttcagatttacctgcctgcccagatgctctcctctgagttcttttaatgccaactcaacctcttctttcagacctggcgcagacattctgtgagccccctgccccatgatgatcacctgctcaagtccatctgatgtggctactgttacatctgcattcttcgcaatcctgcggactgtcttctcaatatattgatctgctgtttctgcttctttcgtatagacgatataaatgttatgatatttcatcacttcacccggattcccctctactttataagcatcatacacaaggatcagggtacatttgcggaatccctgatagttacttagaatatctgcaagctttcctcttgctgcaccaatatctctttctgaaagttctttcagttcttcccatgaaaaaattatattataaccatctaccaaaaggtattcttctgttccggctttcgctctccggcgcgcttcccacttcggatcctgataagcgcttcccggctctattgtcttttcctttgcccggacagttacaggacctgtagaacgattcttcttcggatccggtgtacggacatagatcgcatccaactcttcctgtgtcagttcaatactggagtgcctgcgttttggaagtgtcacctccattacatccatttcatcatcatttcctgattccaatgtatgttccatatgcatatattcttcaacttcatcccaatctacaacaaatcctgctccatgtgcacagaatacagaacctgtcggattcgccagatctgcctccgaatcataggttgacgctgccagaacttcttcctgattatgacaaatatcataacctttcaacgaaactgccattcttccacgtccacctgtataggctgtgaattctttctgatatccacgcatcagggacaccggtgcacttcctgtcagcacggttgtctcttcttctatcatcggtgttccgaatttgccggacatattttggatatccgtcatagctcgtcctacattttctgatggaagttccattcggaattcataatatggctccagaagaatactgtctgctttctttaatccctgacgcactgcacgataagttgcctgacgaaaatctccgccttccgtatgtttctgatgtgcacgtccggaagtcagcgtaatcttcatatccgtgattggtgaacctgtcagcacacctttgtgttccttctcttccagatgtgtcagaacaagccgctgccagtttctgtccagaatatcttcactgcactctgctgcaaactgcattccggatccacgttctcccggttctatgcgcagatgcacttctgcataatgacgtaatggttcaaagtgtcccacaccttctaccggtgctgtgattgtctctttgtaaacaatactcccttcaccgaattctaccagcacaccaaaacgttcctttatcatccgctgtaaaatctcaatctgcacatctcccatcagctgtacatgaatctcagaagtctgttcttcccatacaatatgaagttctggttcttcttcctctaaaatctttaggttcaaaagcatcttatgtacatcacagtcatccggaagaaggatctggtatgtcaacaccggctctaataccggtaaatctgactcttcttctgctccgattccctgcccgggtcttgtattttccaatcctgtcactgcacatactcttccggcttctacttcctggacagcctcaaatttctcaccggagtagatccggatctgattgatcttttcattcagtccttccactacatcttttactttcagtcttccacctgtcactttcagataggtcagacggtttccctgattatcccttgcaatcttataaacctttgccccaaactctgccggataagtcttatcttttatatacagatcaagtccatccaaaagttcttccacaccttgagaatgtagtgccgaaccaaaataacatggaaacacctgacggtctgcaactgctttttgtactttatccagagagattcttccctcttccagatattcttccatcatatcatcttcacagacagccagctcttccagcacctcttccactgcgctctctttcgtatgtaaatatacttttccacccggacagtcggattctgtcatgatatccacaaatggaacgacattttccccaaaacgcttgcggagttctttcagaagtttttcaccatccgttccttcctgatccattttattcacaaaaagaaaggtcggaatgtgatatctttttaataacttccataatgtctgtgtatgtccctgcacaccatctgctccactgacaacaagcaccgcgcaatccagaacctgcagaacgcgttccatctccgcagaaaagtccacatgtcccggtgtatcaagaagtgtgatcgtgcgatccttccaccggaatactgcctgcttggaaaaaatagtgatcccacgttctctttccatctgatctgtatctagaaacgcatctttatgatccactctgccaagcttcctgattgctccggcatgatagagcatgctttctgacaatgtcgtctttccggcatccacatgcgctacaatacctatatttatatatctgtccggcttattttctgagttattccccataaaatctgcccctttcattgttttttcggtgttcggcgtgtcaataagtataaattgcttatttgtgcgagcacaaacgcaatttatacttttgacacttacatcatatcataagaaagaaaaggagtcgactgctcttctttacagccaactcctgcttttctttctctgttatcttctaattattcactgaatgatgcacgaccagactatccctgtcaattgccttgaaagaataccccagattcttataatattccatcactgtcggaagtgcctgaatggtagactccttcgcctctgtgtcatggaacaggagcatcactttggtatactcatccgtctctgactgtgcgatgatctgatctgccgtaaccgttcctccgtctccactgctcacattccagtcataatactggtatcccttatccagcacctgctgtgtcagctgtgtcataattcctgccgaatatttttttgaaatagaattcgatgcgcctcctggaaaacggataaagcatggaacaaatccaagctgttcctttgccacctctcctattttctcaagatcatcaaaataagcatccacagatgcatagacctgatcatattcatgcgtatagctgtgaagtccaactgtatgtccctcatcataaaccttcttgatcataggaaaataatccggctgctgggcagtaatgaaaaaggtagctttcgcatcatactgatccagaatatcaagcacacgctgcgtatttgcagacggaccatcatcaaatgtcagataaacgactttctcatcatcctgcggatccatggttccaactgcaactcccggctgaagagacatggacttatctctttctgcctttgctgcctcttctgcttttttcgcctcttcttcggcttttttcttctcttgtgcttctttctctttctgtatttctacctgacgtaaagctgctgcttcccgcgcatttgccaccatacatacacctgttccgacaatcgcaaaaaacacaagacctaccagtatgttgaaataaatattgttctcctgacgcattcttttataactatgccagacactcaccagtacatcttttatctttatcaacatttcctttatcttttgctgcattctctctcccaatccctctgcgttactgtaaacaacgctctttttcttacggatattactgacatcactatttccagcatctttcgcatacaatatccgtataattatatatattataaaccatacttcttaaatatgtagtaatgattcattaagaattattcgaaaaatgttacatttctgttactcactatcctgcactacttttcacactacatgagaccagcaatgcatccccatccatccgtatttgaccattttctttacaggtgttaaaataactttacagataagcaatcaccgcattcgtatgatctgccacagaacacagaaaggagaatatccgcaatggaagataagcgtatcaccaaaacaaaacgtgctttaaagtctgctcttttggagcttttaaccacacaggcttttgatgtaatttcaatcacggaattatgtaagattgccaatgtcagccggatcactttctacacacattataaagataaatttgctctccttgacgacattttcaatgatatgctgattattggaaaagaaggataccatcgcagacaagaggaaaacaatcctgaaaacaatctcacacagggatatctgaacgttttggacagtattttgtctctttactatgaacgttatgattttttccggcatgtcgtaccggagacaaatccttacctggcttttcgattttatcggatccttttagacacggtagaatctcatacagataagctgaaagcttcttattctttaaaatattctgcaagacagattgccggattcatctgctttggtctgttcggatttatcagtgagtcttatacatcaaaagtaccgttagaacaggttcaggccggagcaagacaacttttaacagatcttctgcaatccaaaattcttgtataatgttttgcatttgtaactgttcagagccaagcaaaatttcaaaaaaagatgtaaaatgcatgcatttttagatttaaacatgaaaaagaacatgccccacagtttcaagacttcttaaacagaagcttttattctctggtcatgttcttttttatttttaatagttacgcctctttttctttgtaatgatgcgcctcttcaagcatcatatctttcactttcatcagtcggatctgtgtactacgctcattctcatccagtttcatcgtaatgtatttgatactttcctctgtctctggaatgataacatgctccagtgcatttacacgacgtcttgtcttctcaatctctgccgccatcagctgacatgctttttcacattctgcaagtcggatcatatctgggaggatatctgataaagacttcactgctccatcaagatcactggaagtaaatgcaaatccataagaatagatatcattttcatccgctgttcttgttttggatgtgaaggtcggaatctcaacgctcataacattcttctcatcaactataagtccaacttcctgcttcggagccatcaatgcagtattcagtgctgcctctgacattccggcccgggcaataacaaaattacggttcgcagagagaattccttcttctacacgaagtctcacttccatattttctcggacaagatccagatactggcgcatcagctcatcacgcttatctttcaaaagcttgtgaccacgaatggctgtaatccgctttttcttcaaacgggttagttccatacgggttggattcacttgtttcgcagccaataccgccacctcctctttctatcttcgatcactctgtctgttcttactctttgtcgtaatattcatccagatatttatcgtcaattcgtttgagttcggtacgcggcagcatgcgaagcagtttccagccgatatccaatgtttcctcaatgcttcggtctgtctgatatccctgagatacatattctttctcaaatgcatctgcgaaacgtgcatatttcaggtcaatttctgtcagtgcggcctctcccaggataaccatcagctcttttgcatctttaccacgcgcataagcggcaaacaactgattcatcgtattggcatgatctgctcttgtcttacctgctccgattcctttatctttcagacgggacagagatggaagaacatcaattggaggtgttactccttttctgtaaagctcacggcttaagatgatctgtccttccgtgatatatcctgtcaggtcagggattggatgagttttatcatcctcaggcattgtcaggattgggatcattgtgatacttcccttcttgccattctgacgtcctgctctttcatacagtgttgcaaggtctgtgtacagatatcccggatatccacgacgtccaggaacttcctttctggctgcggatacctcacgcaatgcatctgcgtagtttgtgatatctgtcagaataacaaggacatgcatatccttttcaaatgcaagatactccgctgctgtcagcgccatacgtggtgttgcgatacgctcgattgccgggtcattcgcaaggtttacaaacaatactgttctgtcgagtgctcctgtctcacggaagctttcgataaagaagttagactcctcgaaagtaatacccatagcagcaaatacaaccgcaaagttttcatttgttccaagtacttttgcctggcgggcaatctgtgctgccagctgtgcatgcggcagaccggatgctgagaagattggaagcttctgtccacgaaccagtgtattcagtccgtcgatcgcagacactcctgtctggataaactcctctggataacacctggctgccggattcatcggcagaccattgatgtccattctggcatccggaaggatctgcggaccttcatcaatcggattaccaagtccgtcaaagacgcgtccaagcatatcttctgatacgccaagttccatgcttcgcccaagaaatcggactttgctgttggagaggttaatacctgttgaactttcaaacagctgtacaagaacatcgcttccgttcacttccagaaccttacatcttctagtctcaccgcttgccagctcgatttctccaagctcatcatatgttacgccttctactccatgcaccagcatcagaggtccggccacttcctgaatggttctatattcttttggcatttaaccttcctcctttacaaatgctgctgcgatctgagcgcttaatgtctcatcaacctgtttaaattcttcgtcaagcttatcttctgtcacatatttaaaacgtccgatctgctctctgaccggcattgagatcagcttctgaagtgatgcaccatcttttaatgcatcggttgctctgtcaaagaattcgttaacgagaaccatcatcatgtgctgtttcttcaatgacgtatacgtatctacttcatggaaagagttctgatgcaggaagtcctcacgaatcgatcttgctgcttccatcttcagacggtcggacggtgaaagtgcgtccatacctaccatcttaacgatctcttccagttctgcttcttcctgaagcagtgtcatcattttctgacggccttccatccagtcttcggcaacctgtccgttaaaccatttttccatatcatccagatacagggagtaactcttcaaccagttgattgccggaaaatgtctcttgtatgccagggaagcatccagtccccagaacactttgacgatacgaagtgtagcctgagataccggctcagatgtatcaccacccggaggagatactgctccgataacggaaagtgctccttctcttccttcttttccaagagaaactacatgtccggcacgctcataaaactgagccagacgacttccaagataagccggatatccttcttcacctggcatctcttccagacgtcctgacatctcacgaagtgcctcagcccaacgggatgttgagtctgccataagtgctacggaatatcccatatcacggaaatactctgctattgtaattcctgtgtaaatggatgcctcacgagctgcaaccggcatatccgatgtatttgcgatcagaacagttctctgcatcaaaggctgtcctgtcttcggatccttcagttcagggaactcgttcaaaacgtctgtcatctcatttccacgctctccacatccgatgtagacaacaatatctgcctcagcccattttgcaagctgatgctggattactgtctttccacttccgaaaggtcccggaacggccgcaacaccgcccttggcgattgggaagaatgtgtcgataacacgctgtcctgttacaagtggcatctccggtggaagtttcttcttatacggacgaccgcgacgaaccggccacttctgcatcatagttaattctttttcgcctttttctgtttcaacaactgctacaatatcttctactgtaaatgttccttctttgatttccttgattgttcctttaattccgtaaggaaccatgatcttctgctgtacaagaactgtttcctgaactgtaccgatcacatctcctgtctctacttcatctccaacctttacagtaggaacaaactcccatttcagatttctcttaagagacggaacttcaactcctcttttcaggttatttccggaaatcttcataatatcatccagtggtctctggattccgtcataaatacttgcgatcagaccaggtcctaattctacagacattggaacatccatagattcaaccggttctccgggtccgagacctgatgtctcttcgtatacctggatggatgcctcgtcaccgtgcatctcaatgatctctccgatcagacgctgttccgatacacggacaacgtcaaacatattcgcatcacgcattccctctgcgataacaagaggtcctgcgacttttttaatcactcctgtgctcattcgcttactcctccaaacagaatatctgatccgacggcctgctcaactgtcttcttcacgccttcaactccggctcctgtattccccgacacacccggaatctgaataatcgccggaaatgtctgctcaccgtacttgttgatttctgacggaatctgtgcagccacagcctctgtaatatagataatgccgtaatttccttctgcaagctggcgaagctttgtcttcgcctcatcccggtccttcacagggcagatgctaagaccgagggtggcaaatccatagatactgtcataatcgcccattactgcaatcttatacatacatctcccttatcctttcccggattgcttcatccggaaattcattctgctttccggtcagtataatccgtactgtcttgatctcattttgtctggctaacagatacgccagaagcggtccaacggaaaatgattcatatttctgtgacctcatagaatctgtcattttattatcacaccagcgttcaaatgcagacggtgatatacgcagtgcatcggcaccttcacgataagatgttccttccagatactgtgcgatctcctccgcaccggccaatgctgcctgtgtcagctgatccacattgatctcggaacaatttaccattgctttcttcataaattctgcattttttcctgtcttctgagatcttactgcaatcttaatatcagcgattgcaactgctgtctgtgcatactcttcaatgatcttctcacctgattttttccctgcttccagcatagcttccagtgttgcgtgatcaataataagatcgcacagctgtccatctcttgtgtgaagcagagtgtcaaatgcttctcttgctgttgctggcatattacccggcagcttatcaaattctttgttctggacaagtgcaaacatctcttctccaggaatctcacagtcatcgtaaaaaatgtttttattctctacttccgtacacacttctttgatcgctgctttcagattgtgataaagttttggaagtgacagaacatcgaatacatgcatatccggtgccacctcacggattgtctgccacatcttctcttcttccttattcagaacttcatctgcatccaacgttcctgctgtcagatctccccagcccttttcaaccagaagctgtagagcctgttctgcactcttgcacgcaagaagctgttcgatcactgcattcgttaaaagagagacttccagtgcacggattctggcaaccgcataggtatattttgtcttactcaagattatccctccttgcggctacactgctgtaaacagctgccggttcactttatctgataactcttctctttttgcatcaaacaacgctttgatcgtacaattttcttcgatgccgccatagatcaggataaatcccccatccattccatccggcactgtctctgtaagttccaggcttccgcctttcttcttcgctgtttcatatactttttccatatacccttgaggcatacgttttctgtctttctctgtaaagcagatggttccttcttccggaagtacatacttctcaagaaccttttcaagcattgcaaaataagctgcatcatcaagctctccgactgctttgtaagcatcttcaagaacttcactgatcacttcctgtttcgcctcaagtactgccttgcgctttctcatatctgatgaagaggccaggcgtttcacagaatcttctgctctggcttctgcctgtgcgacaatcttccgtgcatctttctctgcctgtgcttttgcttccccaattatagaatccgcctgtgcgtgtgcctgtgcgagtatctcttttgcattgtcctgcgcctctgcgattatctgcgctttcattttgtcaagtccactcatctccacgctctcctttttatttatttcttacagctggataccacttactgcgaggaaggaaatcagaagagccaggatcgcatatgtctcaaccattgccgggaacagcattgctttaccaaactgctctggcttctttgctacgattccgatagaagccgctgctgtcttaccctgtgcgatacctgaaatcagtccaacaataccgattgggagacaagctgcaaggatcataagtcctgactgaacgctaacttctactccgccaccgccgagaataccaattttagaaagtgtaataaatccaacaagcagtccatacagtccctgtgtacctgggagcagctgcatgataagtactttagcgaatttgctcgggtcttctgttacaacacctgatgctgcctgtcctgcgatacctacacctaacgcagatcctgcacctgcgaataatactgcgattgctgcgcctaataatccatatacaactccaagttcacctgctatattcataatgttgtttcctccttaacatcaacatatttcgtattttctttaaaaggctcgaatgcttttccgccgccttcataaaattttccgaagaattccacaaactgtaaacggtttgtgtgtacataagctcccagcagattgatcgccaggttcaatacgtgtcccacaataaagattacaatgaaaagaatcacaccgatcacattgtttggaagcattgctcccatctgattgataactgatgcaataactcctgttgcaagtcccagtgcaagaagtcttgaataggacaatgcgtcactgagccatcctgtcacgttatacaaatcatacgctccaagcgcaagccgaagcgccggattcttgtttgctcttcctgacatcagcacaataccgattgctccacccgcagccatcacttttgcagcagtgttcaaagctgccgggaacacgatcgtagtctgtgcgatcgatgcgaaaatgtcacttggaagcagcatcaggatcaacccaatcagcatcacaaaccaaagtacaacgtcacagataaaatctacaaccttaccatcttttaaacacagataacctttaattccaagtcctacgaacaaatgaattgttccaaataacaaagaataaaccagaagtttcattggatcattcaatggaacaaaccaaagtgccggaactgttaccgtatgtccgaagaatttttctgaaacaatatctacgatatttccaaaatatcctccaaatagaacgccccatacaagtgtagatactccacagtagaaaaacagtttcaaagattttgccatgctctgtgacattcttggatatttcttcacaagaatcgcacacacaattgcaacaactgctccatacgctgcatctgacaacatcattccgaagaaaaatacgtagaagaatgacatgatcgttgtcggatcgatctctccgacatgcggtaatccgtaagattctacaatgccttccatgtttgtagagaatgggttattctttaaaataaccggtgcttcttcaccttcttcaatgtcttcaatatctaccatacagttatatttctctgtcaaagatttctctaccggacctgactcacatgccggtatatatccactgatcacaaatgtacgctttgactgaagaagatctccgagaactgcatacttatctgctcggactctgtaataatctgctacggcctgaagttcttttcttttggaagccaggctcttaagttctgcctcgcactgcgtcatccgctctcttgacgctgctatctctgtttccagtacttccttctgctcttttggtgtcttgctccagttctgggacggtcttgcaaatcctgcactccgaagtgcttcttccactgtctggagttgttctttcaaacagatgactgcaatgcagatcatattagattctgctgaaactaaatgtacatcgacccctgttttctccatcacttccggagtcttctcaagtagaatggaataaatgttctcaagagtaagctctcccggcattgttcccaggatcaaagcagtcctttttgtcttcccttcctgaagcggaacatctaatgccatccacggcatcagactttcaatctgattctcaatctttgctatgcctgctctaagctcagcatactcgcgatcaagatcataaattccgcgggctgtcttgatcaattccggtccagatatctgaaccttttcttccaactcgcgatcgatcagttcttttccttccagcgaagaaagtaatgactttttctccggagcgtaagcatccagaatccccagtgcctgatctgctgccgttgccgctttttcaaatttcatccgctgtccggttgtgtccatcttttggaagaatgcatcctcttctttgtccctgtcaacttcaagaactccaagatgctgtaactgttccaggattgcttttcgatctttcttcagggcacagatgctgattttctgcatcttaagtaccgccataatcttatccctccttttttgttacgaccacatggatcagattaattcagaaagaactagctgcactgctgcaccatttttctctcttgcagaaaccttcagctcttcgatcacatctttgagcttctctgcttctttatcttcctgatttttcgcctcttctctggctttctcatccagtccaccggcagttctttttgcctcttctataagttcttcatgaatctgctttgcctgaagagatgcatctttcagaatctgttctttttgttcctgcgcttttacaagaatctcttctgcctgctgttctgcttctttaattgaccggattgtctcatccaccatagtatctacaccacctttcttgtctcccctttttattgttcttatgtgattttgaacaataagatttcttcgttgcatgttgttactgcacattaatatctaaggattacgctgttcgcagcacgtatcaatatattattaccatacttttctttcctattctctttttgtttgtaactttcgcacaacgatgttattttaaacatagcatattttgtcgtaataatcaaactttttattagatttttataaataatttttagattactaaatatttcgtctattttttgtagtttattaaacgttttttgtgtatttgtataaatatctgattatttgatgtaagtgtcaaaagtataaattgcgtttgtgctcgcacaaataagcaatttatacttattgacactcacatcattatttgccatttaaaaaaaggaacaagatcaaaccttttttcaaatgatttgaccatgttccttttacactttatttccaatgaagttcgtgcagctcgccacttaaattcattcctgcgaatccattctgtcgcagtgcttcatacaacacaattgccaccgaattaccaagattcaatgatcggatatctccgttcatcggaattctcatacaatcttcctcatgctctacaagaatctcctccgggattcctgcgctctcttttccgaacataatatagcaatccgactcataatctacttctgtgtagactttgtacgcttttgtcgttgccatatagattttagctcccggattcttttcaaggaaatcttgataatcgatatatgtcgtcacatccagatcattccagtaatccatgccggcgcgctttaatgatttctcattcagcttaaatcccaatggctcgatcaaatgaagccttgtccctgttgctacacaggttcttccgatattccctgtatttgccggaatttccggctcataaagtacaatgtttaacataattatcgcctcttctatcttcttattcgttactgttcacacgatgtgcgaccagcaacgctcgctctttccaccagcggctcagttcatccggtgccggacgatccagataccgggtttcttctccatttacaagtgttcttgcattctgttcttttacaaatccgattcttactgccggaacacctgcattcttcaagctttccaatgtctcttctccatgctctgtcaacacaagatagcttccggccgatgtaagaagatatggattcagctgaaagaattcacagatttccactgtttcctgcttaagtgcaagttttgagaaatcaatctcaaaccctatcttttctgcctctgcaagttcccataatccgcagagtacacctccatccccacactgtctgctcttcgcttcttccggaagctttaaaatctgttccggaagtataagtgattccttgcaacgctttgttttttctataaaagatggtgtaaatcttgtacgaagatctgcctctgcctcttcaaccaatcgcaacgttccttctaatcccgtataaccgcaaagaatgatttccgttcccggaaaccattttttcatctgctgttttgagttttctttcacgccgacagcagtaatctgaatcactgtccgcaaaacatactctgcactttcagcctgtacacaggcaatggcaagtcctgtctcctcacagatctctgtcaggattctcatgatatcttttaattcctgctcgtcagaactttcagggaacaaaatctgtactgaaaccgctgttggtctgactctcttcgccgcaagatctcctgctgatttaatcactgcatatttcacctgtgccggtgcttttccgcttactgaagcgctgctccagacaaaatccttatcgtcagataccagttcagaactgctttcttcccacgcagtttttcctgttgaattcctgtttactttttggatctgtttctttacagaacgattccagatcgtctgcgttactctccctgtccgcatcacactctccttagaccagatatggaatcaccatcgttgcaaccattgcaacaataaccaccaaaataataattgacaccaaacgtcttacttttttatcataaaaattcatcttttttctccatttccattaacaaaaccatatgcaaatatctttctaatgtctgcaactctgtactaatcctctattatataaatcgccgcatcctgattcagcttgtttctatgtctgtaatcaaaaagatgcagctttccattcaatcgctccagatgagtcatctttcgcagttggcgactgtcgtatccttcataatccttcagatacttgtgctcttctgcctctttcttataaaattcagacgctacatctttttctactttgctctctccaagaaatgccggacgattcttcacattatctctcagataaagatctaaagtcatgctttcaagcaccttctctttaaaatctgcttctttcttctgtatttcctccgaacaagtaaattctgctaattctgattctacaaagtcccacaatatctcataacgtgcaagccttgaatgattcaacccaaacaagcctttcttctcataataattgcccattttctcatacatggaaaatgcggatggaaacaattccacaagaatcctcatcgtatgactaaactgaaaactgttatagtaaacttccaccatctcttccactttcttcaggcggatcacatcactgtatggaagccattttgttgaaagcacttcatacggcggacgattctggcaaagcagctcatactctttcatcttctcatgcatcacagatccatgcagtactttcagaaatccaagctgaaactgatccggttccatagcataaacttcattaaaagaatgagcaaaactatcataattctcatatggaagacctgcaatcaaatctaaatgctgatgcacatttcccttctcatgaatccttgctaccttatcacgtactttttccagattcatggaacggttgatttctttgatcgtctgtttattcgttgactgaattccaatttccagctggatgagtcctggacgcaaactccggatcaactcaatctcttcctcattcagaagatctgctgccacttcaaaatgaaaatttgtaatccctttatcatgctctttgatataattccagattgccattgcatgatcatgcttacagttaaatgttctgtcaacaaacttaacctgtggcacttcatgatcaataaagaactgcaattctttcttcacaagctccaggttacgaaatcgaagacatttatcaattgaagaaagacaataactacaagaaaacggacagcctctgctcgtctcataataaatgatacggttcttgaaattctcaatatccctatagacaaacggtactttactcagatccatgatctgtcgaaacggtgtcgcagcaatctgtttttccttttcccggaatgtgattccctgaatattgatcaactcagctgcaccacgaccttcataatatgccacaagttctgcaaaagtctcttcaccctctccgcgcatgataccttctgtcattggatatttttccagaacttctcttgcattataagaaacttccggacctccaagccagatcttcgtatccggcagaatctttggaatctcctgtatcaattgccctacttctgtcacattccataaataacaggaaaggcagagaacatctggtgcctgcttataaatatccatcaaaatctcatcaaatggctgattgatcgtatattcagaaattgtgatattgctggccggatgctgctctttcgcatatgcgcgcaggcaatagaccgcaagatttgagtggatgtactttgcattcaccgctgcaagcaaaatcttcatctttttataaacctcttttcctgttaataatgtatatttgtaaacattttcctttttaggtcttacctatctattctgaatgaagatgtaagaaatgtcaagatatgtgaagttgtgtatataacataaaaagggaaagctgttactgttcacacgatgtgcgaccagcaacgcatctcgccattttaaatcgcctttggcgatggggcgagatgcattcaagtcaaaacatgcatcctccgtgtcaatcagcggagtgattgatacgggagtgaacagtaaagggaaagctatcacttacgataacaacacaaattgtgtcagattatcgtatgatagctttcccttattttgcagctttaatcaaaagccacctcttctttctgctcctcacggaaaattaccccaaatacttttctgacaatcggtcctgcgaagcacagctgccagaagaatgccattgggaaattgaatactgttgtctggaaccacacagcaatcatctgatttcctgcatccttaaagagcagtgttgctgcaaggctcatcagcgggcacattccaatgatggataaaacggatatcgccagcacgatcataaacggattatctttctgtgggttcacgatcataaatgctttcttctttgcaatcggtcctacgagaaagaaatccagaatgaaagcaatcggtcccatgatgataagttcatggaatgctgccagaaagacctcattactcattccgcccatattcagggaaatgttgtagcagatcattgcataaaccatgacaaaaaccatcatgattgtgaaaattacttcttgaaacttattttttggcataaaaaatcctcctatcatgataagcgtaacagattgtgttgttcgttcatcattccggagggaatgtatcgtttccaatataaataccattctattcatttttttacgtgcattgcgcttcgaacttggcccacaagcgttaccccggtagttaactcagcccaggcaccctcacggcacccgagaggttctgcttagtgctgctccgttcccgacctgacacggttcacagagtcccgtcgcgtgagacccagacgtcaacgtcactttccgggggcagccctgcagactgtcgccctctgcgcaatatcacccctgctatagcggattgcaggttcaaggtaccgctaccaccccggctgcacggattattattttacatgataaatgaatacttgtcaagtaggctgttctttcttttgcacaggagtttaccacaggatttaattttcctatgttacagagtctgtaactccgcttttttcttcatcttcctggcttccctgagttctctgaaaaactgcttcatcaactggctgcattcttcttccaatacgcctgttgtaagatctgcctgatggttaaatgcctggatatccagtagattcagaatggaacctgtacatcctgctttcggattcatacacccgacaaccactcttggtatacgggactggacaattgcacctgcacacatctgacatggctctaatgtcacatacaatgtacattcttccagacgccagtcaccaagctttttgcttgctttcttgattgctgcgacctcagcatgtgccagtggattcttgtctgtattccgtcggttataaccgcgtgcaataatcttatcttcatgaacgatcacgcaaccaatcggggtttctcctagattatacgctttctctgcctgttttaaggccgtacgcatatatttttcatccgttgtcatcctcattttgtttcctttcggttattgtataaaaatagcattaatattccttttcattctgaataaactatatagaaaaattcttttcaggggcttgctatgaatccgggaagttattatttatatgagtacgaatcctgctgccgccgcagaaatcttggttttctacaaatttcatcacataattattcttatctcttaacacttcatgttaaaaatcttccgattgtccctggagaacagttggaagtccatgcatttattctcgaaaatcaaacacttacaggttctccggttgcacttcttcagtgctctggtcagaacttatccacacaactggtcatttccggggaacgttttccacataaaagaactcttaaacacattgatgggttcattattttctccatcacccagaatcgatcacagcattggattgcctccgctgtacctctgccggatttttattctttttctgattgctctttatcaacagaagagattttatcctctgaacctgagaatccatccatttcggaagaatccctcataacagaagacactgtatctgagactgtatccgaaacagcattatctgacgcttctattgctgacacttcaactttgaatgctccaactgaggatacgctaaccgaggatgtttcagctgatgatacttcaattcatgacgcttcaattcaagccagaaaaatcacacacgcagagatttccacacttccgcgcagattctggccacttgccaacaatagttttcttctgcatggctgtcataattatcatcaccttctcctgatcaaagaaaaggatcatctttggcttggcgttcccggcctttacgatcccagagaagcacatatggctaacttgttcggctttcctcaatttaccagttcttacatctctattctggaacttaccgaagaggaatgtgaaaactctgaatctttcggtcactggtgtcgatacttaatgtgattcttaaaaagaaaggaaaaagatagagaaaggaagcgttcacagcggatgcacttcttttctctatcaattttaattttaatccagataaattggcggttcgtaatcctctccaagaagtactttcttacgttcctgatatccgaggaatgcccattctgtcatatctgtccatttatggtttgcacggtcataaacctgcacatacccaattcttttcggatgcatacgtacgctgttggattcatattctcttcctgtgtatggattaatgtctccaacttcttcctgtacaggctcttcgtatgttgcctcttcctgcaccggctctaccggctgtgtctcataggatgtaacttctgcttcttcatatggttctgcttcttcctctgccggttgagcataatcttctgtataagaaatttctgattccgcagggttttcttcttcctgatctgattccggcacttcctgaagctcttccttatattcctcttcttctgcctgaagttcttctctgacatcttcagttggctctgcttctactgcattcttttcaagttcagcaagttcttcatgcatatcataaatctcaccgatcgtcatgtcgcgttcttcacctgtaagctgctgttcttccttctctgtctccaccgtttcctctgaaaagctctcttccggctgttcctgttcattccattttacttcctgctttctgatacgtccgactgcactctctgcaatctctcctgacatgatgctcagctgaaacggacagccaagaatagatgcgattagtctcatatcctgttcctgaaaattatcccttccaagacgctgtgttaaattctgacgtgacatcttctttcctgtctctttctcaatcgtctccgccagttctttgatcgtcattccttttcttcccaggacgattttcacctgttctccaaatgttaaatcttccatttacttctcctccttatgtattatttatacttctctcttatctgtcgatcagaacggtttttacttaatttgcagaaacatattcttccaaagtaagtcctttctctgtcatctcttttgcagcatctactcccacataacgataatgccacggctcatatataattcctgtaatattagatttatcctgcggaaaccgaagaacaaaaccatactctgaacaatgttccatcaaccacttttgctcttctgtatctccctgtttctcatcaagctccccgtactttgtcgatataatgtcaacagcaagaccggttgcatgctcgcttgttcctggaattgcaactgatttctttgtctcatcatacgcatttaacggtgtgtatccctgattgatccagtcctgcatcgtcgtattaaagacatctctctgtttctcataagaacgatatcctgatgtcacatacatgctgagtcctgccttcttcccatcatccagcatcttattcagactgtctgctatcctggaatctacctgttttccaccacttatctccgtcagcttcgccggcacataagaagtatccaatggatgcttctcattcacaagtgcaagacaccatctgtcatcatcacttgccagcaactctgcagtattttctgttacttcttctctttctaactctgcctgcagttcttcgttcttctttgtctgctcctgtaattttgcattgctgatttccagcttcttttccgcttttttcaatgtaattgaggagattcctgaagtaattgccactcctgcaattactcctgccaaaacccctgtaagcattagtttctttgctctgtctctgaacaatgctttattcatcttatttaatttcaactccatctgtatttttcatcttatcctctgtaatatttagaatctcttccgtttcattccccccggcagatcatcctattccttcagatatcgcacttcaaatgtctccactttgatcggtttattaaataatgttccctgtgcataatcgcatcctaattcctgaagaacattcagctggtcctgtgtttcaacactctccgcaagaacagaacatcccaattgatgacaaatatcaattacggcctttgctaccactctgcttcttctgtttccaaccagatttgtaataaggctctcatccagcttcaatccatcaaaatccataatggacagaatcgaaaagctggaattcttagctccgaaatgatccaatactacgcggacattcgcttttctgattttactgcatgatgccgccagcatctcctggttcgtatctgtataagattcggagacttctacttccaaatattcgcataatacctgatatttctcaatcagcgcactcatctgatccgcaatgttctcctgcctcaatgtttcacctgcaaagtttactgaaatcggcaccatctggattccttctgtctcccacttatgaaggatctgacatacctgttcaaatatatagagatcgagataatgtgacagccttgtctcttccagaagattaatatatcttcccggatccataattccaagatccttatgatgatatctgacaatcgcttcagcacctgcaatttctccggtctgcacatcaatcttcggtaccagacatacaataaaattcttctgttcaatatcctctagaagatcctttttgatgattggctcatgatgacctttacgcagatttttataatacttctttttctcttcccgcatcatattctctgcactgatcacaagaccattcacatctatgtccacttttccccaggcataccctactgaaacaagtcccagacttatgttttcaagttttgtatatgcaccatgtacctgttgtgtaaaatcttcataggaagcgttctctacaagaaccagatactcatctcctgtcattctgtatacattaccattatggaaatactccgaaagcacttcaccaactctggtgacaacttcatctccataatctcttccgaattctttattaaaattcttcagtccattaatgtctacggaaagagctcccaatgtcttcaattcttccggttccacatgatccagatatgcaacaaaactatttctgttaagtactcctgtcagattatcatgataactgagatactcctgctgtttctggagtttatgaagagcgattgcctgcggtatatacggaatcaccgtacgaagcaatccaacatcacatccgccccggtgaactccaactgctgcaagaattgctactgtattctcatccagctgtaaactcacactgtaatcggcctctgttgaatttgtaatctcctgcttcatccactttggctgatgttcttccggaagcatctttatcttatctctctgccatggaacattctctgcacaccactcaaagatggtctcaatatccccatactctttctcaatatagtacacgtattctgaatcataataatcacgtaccgcacgaagtacatcatttacgatttctgagagagaacgtggcttctttctatcactcatatcatttttcctctgtctttctataattttagacactcagataagattattgtattatactacgaattaaaatgcaatacaaaaaagtttcgcaattcacttttaaatgtaaaaaaagagggtgatttcccattccagaaaatctatccctctttctctaattaaatgatatatcctgcagatatttctgatttctgcacatctacatgctctcgaaatctataaattccactttttatcctgtgaaacacgaagtcggttcatcgctcttgccagagatgcctgcgtatgataatactgctggatactctgctgctgacgtaacctttcctctgcacgctctttctgctcctgtgctcgtcgcacattgatgtcttctggtttctcggctgtatcaacaatcagtgtgactcgattgtttacgatttcaacaaatcccacacccactgcaatatctttccattcatcgccgtccaaactcatatgtgcaactccgacattcacagcgatcaccatattctcatgatttgcaagaattcccttttctccatccggagccgggatgatcagcttcttacaacgaccttcgtagaatacaccatcacttgctatgattttcagaccaaatgtatccatatgcacattctcctatttcaacaattactcttcttccatctcttttgccttggcaattacgtcatcaattgttccgacattgaagaaagcattctccggataagcatccatctctccgtcaatgatcatcttaaatccacggatcgtctctttcagcggtacatattttccaggaattcctgtaaatgtctctgctacgaagaatggctgggacaggaatttctgaatctttcttgcacgcataacagttgctttatcttcatcagaaagttcttccataccaaggattgcgatgatatcctgcagttctttatatttctgaagaattgcaattaccttgttagctacttcgtaatgctcctctcctacaacgtctgcttccagaatacgggagcttgactccagtggatctacggccggataaataccctgctcaacgatctttctggaaagtacggttgttgcatccaggtgggcaaatgtagttgccggagctgggtctgtcaggtcatcggccggtacatatactgcctgaaccgatgttacagaaccgttctttgtagatgcaatacgctcctgaagttcacccatttctgttgccagtgtcggctgataacctacggctgaaggcatacgtccaagaagggctgatacctcagatccagcctgtgtaaaacggaaaatattatcgatgaagagaagcacgttctgatgctgctcatcacggaaatattctgccattgtaagtcctgtctcagcgacacgcatacgagctccaggtggctcattcatctgtccgaataccagggctgttttctccagtactccggattctttcatctctgtccagaggtcgttaccctcacgggaacgctctccaactcctgtaaaaatggaatatccgccatgctctgttgcaatgttacgaatcaattcctgaatcaatacggtcttacctacaccggcaccaccgaacagaccgatcttaccaccttttgcataaggagcaagaagatcgataactttaatacctgtctcaaggatctcaactaccgggctctggtcctcgaatgtaggcggctgtctgtggattacccattttttagaatctgtaatcggctctccgttatcaattgtctcaccgagtacattaaataatcttccaagtgtctgctcgcctacaggaacctgaataccggctcctgttgcagtaacttccatatctttacaaagtccttcacttgcagcaagcatcaggcagcgcacctcattgtttccaaggtgctgtgcaacctccatgatgcatttctttccattattatcaacttcaagagcatctttgataaaaggaagatcaccgttttcaaacactacgtcaacgacaggtcccataacctgtacaattcgtcctttattcatgttctctctctctttctatatttcagtcattacaaactgcaacaacctgctgtctgtaacgcatttcgacattttaactcttcttctgctgagctcttgcgccggcacaaacctctgtgatctcctgtgtgatcgcagcctgtcttgctctgttatagaggattgacagatctttaatcaaatcctgtgcactgtctgttgctgacttcattgccatcatacgggcattgtgctcactggcataagcctcaaccagacatccgtagatcataccgttgatataacttggtacaatactgttcatgacatccataggagatggattcagttcgatttcctctcgatacatattcaaaggcatcttcatttcaccaaaatcccctctctcgagtggaagaagttttaacacttccgcttctgactgaactgcattttccattcgtgtatatactacgtaaacttcatccagctcatgattgttaaactgatccagaataaccgctgagatgtcacgggcacgatgcatggtcggtttctgaactgtataacggaagtttgtatcaatatctacatccttctttgcaaaataatgacgtccaagctctcccacaacaaaaagcttatgctgccccggcttggaaagaatctcttcctcaagcttcacaatattgtgattgtaagcaccggccagtcccttgtccgccgtgataacgatcgatccaatcttacgttcctctgccggaatgttttccctcttgttgaaatagctgtgatgtaattccggtaaatgacgtaaaatacgactgatttcaccctgtagtgcatagaaatatggttctgtatctgccagcttctttcttgcctgtgtcagtttggaagaagagatcatatacattgcattggtaatcttcattgtgtctttgacactgttgattctgctctgtatctctctgatatttgccatattaacacctgctcttcttaaattccttcgctgtctctacgattttgtcgatcagttcctctgtcaggactttcttctcttcgatttcctgaccgatctccggatgctctgcttcgaacatctgaagcatatcatactggaactgtttaatctttgtcttctctacacctaaaagtactttatgtgttgctgcacacagtgtgattactttctcatgcagggaaagcggatgatacaatggctgtttcagaagttccatcagaccacttccatattccagttcttccttcgtagctgcatcaagatctgaactgaactgtgtgaagacttccatctcacgatactgcgccagatcgatacgaatacttcctgatgctttcttcattgcttttgtctgagctgcaccaccaacacgggatacggaaagtccaacgttgaccgccggtctcattcctgatgcgaaaagtccactctccaggaagatctgtccatctgtaatggaaataacatttgtcggaatatatgctgatacatctcctgcctgtgtttcaatgatcggaagtgctgtgatagaacctccgcccatctcatcactcaaacggctggatctctccagaagtcttgaatgcaggtagaatacgtctccaggatatgcctcacgtcccggagaacgtccaagcagaagagaaagtgcacggtatgcaaccgcatgcttggaaagatcatcataaatgatcagtgcatcttttcccttgtgcataaagtactctgccatagcagttcctgcatatggtgcaatatactgaagcgaagcacagtcacttgctgtggaagatacgatgatcgtatagtccattgctccgtgtgtctgtaatgtgttaacaactttggctactgtagatgctttctgtccgattgcaacataaacacagatcacatctttgcctttctgattcaggatcgtatccagtgcaatggatgtctttcctgtctgacggtctccaatgatcaactcacgctgtccacggccgattgggaacattgcatcgatggaaaggatacctgtctcaagcggaacgcttactgacttacgatcaacaattccaggtgcctcattctcgattgggcgatagtcgtcagatttgatctcaccttttccgtcaatcgcctcaccaagggcgttgacaactcttcctacataagcgtctccaaccggaacgcctgctttctttcctgtacgggctacctttgtgccttcacggattcctgtgtcacttccaagaaggatacatccgatctcattcttacgaatatcctgtaccattcccttaaggccgttttcaaaagtaacgatttccccgtacatggcgtgatcaatcccgtagattgtggcgataccatcgccgacagtaacaacagtacctacttcactgtccttactcattgtatcaaaattctctatttcttctttcaggatagaaataatttcatctgaattgattgaactcaccttgttcacctccaggtcaatctttgttctaatctgttcaggcgtcctttcatactccagtcatactcatcactgccaacccggagaataaatcctccaagcagtgctttgtcctggcgaacttcgattttagcacgatttgcgccatatttcttgcaaaggaacgcctccattccttttttctgttcctccgtcggaggctgaatacatgtcagaactgcgttcagaacctgattctgttcatcacagtatctgtcatatgctgtgaagatatcttcgatcagatccattctctgatatctgcacgctactttaaggaaatttcttatctcctttggaaatactctgtctaccacattcatttttttctgaagttcaatggtaggattcgcgaaaatctcgtgaagctgcggtacttcctcaaaaatctcacgtgttttctgtacagcttcttttgggacacctacttcatacaggacacgtgcatatctgattgctgccatcgggcagtaaatctgactcttacttgtctgtgtcttcatctgtcccacctacttctcccaaaaactggtcataaatgttctgctctttgtctcccacgatcttctcagcggatgccatagccagtcctgcaatctgagtctgaagatctttcattgtcttctcacgctcaatacgtacattctcttttgcagcttccagaagatctccggccttgcttcctgcttcacttacgatgcggtcatactctgtcttagcctctgagcgtgccttctcaacaatcgctgctgattcaagctttgctccctttaaagcatcttcatattcctgtttcatcttctgcgcatcactctgtgcatcctgtgcaccctgaagaccatctgcgatcatctgtctgcgcttctccatgatatcactcaccggtttgatcagaaaatgtctcaacaggaggaagagaacaataaggttgataatggtatagacaaggttcatatttaactgaagcaccttttacacctgcctttcctgttatctgcttccatcattttcataagattcttttcgtttcttatttcaggaagaagatgatcaggataccaatgatgaaaccgtagatagctgttgcctctgcaagagcacatccaaggataaggttcttactgatcttgctttctgcctctggctgtcttgcgatagcttctactgctttacctgttgcatgtccgataccgatacctgctccgatacctgtgaatactgcgatagctgctccaatagcaataagtgttgacataattttaatctccttttcttttcaatagaatgtgttaagttcttactccatctcttcattcataaacagagatgtcaggaatacaaatacgtatgcctgaagtaggccgtcgaaaatatcaaagtaaaaactgattggaatcggaatgatcagtggaacgattgctttcaaaagttccatgactacgaatcctgccagcatgttaccaaagagtcgcatacaaagcgacaacggccggatgacgatttccagaatcatgatcggtgctacaattggaatcggctgtgcaaaatgctttgcccaatgtccgaatccattcttgcggatacctgagaattcaatgagacacatactcatgattgccagggctgccgtcacgttcagatctttcgtcggaggcttaaagccaaacaatggtgcaattgtgtttgaacaggcgagatataacagaaccgtaatcagatacggtacatagcccttgttctcttttccaagtactccgacaaagaagtcctcagcggcgccgataccggcttcgagagccaactgcacttttccgggattctcaacctttaagtttcttaccagaataatggatgctatcacaagcactgccatgatgatccaggtaactactacagattcattgatcccgccaagaaccggaagtgtgaacactttctcacaattcagttcttccataagattgtctgccagatttcccgtattgctccctccctttctacctaatgtatattgctgtattttgtcacttttcgtatacagcatggcaaatgttactgcttataatcgcattaaaacgtcatgttctccgaaaagttgactaaatattactcccatgttttctctttgtcaacgttccacttcaacaagttaaattcataaaaaaaacactttttttatttcaatttgctctttttttattctacgttttgtctattttttattacttttttaaccgtttttcgctcttgttttagaatccgctctttttttatgcacattttccacaataaaattgtttttatttctatacatttgtacgattcaaaaaaaatttcatagacactttgtcttaatttgtatattaatgataatttttctcctgtttttcgtatccttttcagaataatagcaaaaacagatgttacatttttgttacgattttgttttctcaaaagaaaagcacccattttcaaaccatagcatatggtgtgataaataaaattttatttttcaacatatacttgttttggctacgattatgtgctatagtaattgcagctaagaaaagagatgaatatgacatattcacacaaaaatgacccctcatgagccgccaactcatgaggggtcttctcttttttgagggttgagcatccattcaggctaattgtcgctgtcatctccgtctagccatttgcaaactaattacaaatgtaacaatatatgtttagcgttttttcaattgctgatacacatatgataccggcagtccaaccacattatagtagtccccttcgattccatctatatacgccgcaaagcttccctggattccataagctcccgccttatccatcggatctccggttgtgatatacgcacggatttcttcttcgctcatctcatgcacatgaacctttgtctctaccgcatggttaatgatttctttctcgcctgcattattataggaaagaattgcaacacctgtatagacttcatgtgctcttccctgaaggcttagaagaatctcatatgcatgatcttcattctttggcttgccaaggatttcttcgtcacgtacaacgattgtatctgctccgatcacaattgtatttttcaattctactccctctgcctgaagatcagatgcaacattttctgctttcatcaatgcaagttcttctacaatcttctgtggttttgtacttgtatagacttcctctttattacttacctttacctcaaattctaaaccgatttgcgcaagcagctctcgtctgcgcggagatgctgatgcaagaatgattttctgattcattatcattatcctttcctattattataatataattttcaccgatgtcatttctttcttcataatagcataactgttcagagccaacctccaaaatgctacgcatttcgtcggtgtgtcgtatccgccaaataaaatttaaaaaacagtcttaaaaatgcaagcattttatacctgttttttaaattttgcttggctctgaacaattacataatatcataaaaagagtggacagcaaaactaatttctgctgtccactctcttcatattatgaaagactttgaaatttataagtcttgttctcttcaatcatctatcacattcgatgaaactccaagtgtcatatcttcttcaagataaatcatagcttctgttccgtctgtgattcttccgctgaaatgtccggcgaattttccggccagatcagatgttccgctcacctggactgtaactgccggttttgcttcttccggaatctcaatcactcttttctctccagactgcattgccccgattgttactgtttctgctccgttgaacttaacctgaacattttccagttcaagcggtgaagtgttacggattgttatgttacttgtatactgtccacttgcttccacatattctgattttctatataaaaacatgcctgtaaacaaaaagataactgtaaatgcgatgatcagattctgcaaaactcttctcattcccctgcctcctataaactctctttaaaatttctattcttattttcctttattacactaacagaatagcattcatagatttctttttccagagacagattcacttaatttttttctgtttttcatcgttttgtcattgatttcgttgacaaacattgtttatttcaagacaatgtaatcgtttccacacgtttttgttatattttcacaatacttcttctcacagcttattctatacaatatccaaataggtcttatgctccggtgcaggaaatgcacggtcaagagcagcgtattcttcgtctgtaaggataacatcttttactgcccagttctgaagtacatgctctgttctgccacttcttggaattgcaatcacctggtctttccgaagaacaaatgcgagaagtacctgcatcggtgtaatgccacgagcttttgctattttctgcacttctttgttctttaacaagcttctttgcaggcttccagcctgtgcaagtgggcaatacgccataatcggtgtctgatgttcttccagccagggcatcagatcatactctatcccacgggatcccagatgatacaatacctgatccacctgacagtgatctccattgggaactgaaaacaattctttcatatctgatgtatccagattggatacgccccagcttctgatcttgccttttttcaccagttcttccattgcatccactgtttcttccaacggaatacttccgcgccaatgcaacagatacatatccagataatctgttttaagattatgcaatgtctggtcaatactgtcataaatctgcggacgtcctgcattgtgcggatatacctttgaaacaagaaagagtttttctcgagaatatccctggatcgtattcccgattaatttctctgaaagtccatttccatacatttcagctgtatctattaaagtaaatcctgcatcaatccctgcctgaagcgccttcttttcctgctggtagattgacagatgttcaccaagcatccaggttcccataccaagacgcggcattttcattccattttttaatgtaagatataaatcactcattttctttcctttccatatatcgaatcatcccttcagcagcccgttttgcttcctctacagcatgaaccaccgtattcgctccctgtacaacatctcctgctgcaaaaacaccttcatgtgttgtcatgcagttctcatctgtcagaagaagtcccttctctgtcgtttttaactgatccgttgtaagtaccagcttattctttggtgcctggctcacgcaaatgattacagagtctgcttctacctgatctaatttttcttcatatccgatcactttattgttttcatcaaatatacttgttttaaacatcgggccggcttcattgatcgactctattgcctttccaaacacaaagtctgcgccctccagttttgtataagacacctcatgagagcttgcggaaatgcgttttcctcttgcatacagtgtaacctcttttgcaccatgacgcaatgcagttctggctacatccatcgcaacatttcccataccgataacagctactttctctcccaattgatgtgcctccggtcttctgaggtaatcaatcccaaagtatacatttccaagactctctcctttaattccgattgcctttggcctccatactcctgttcctacaaagacgctgctgtatccgtcgcggaacagattatcgatcacgattgcgcttccgatcacggtattcgggcgaatccggattcccaattcttccattttctttttgtatcggtcgatcacagattttgaaagacggaattctggaattccatactgcagcataccgccgattttgcttcgttcttcgaaaatcgttactttataacctgctaatgcaagcttgatagcaactgtaattcctgccggtcctgaaccgatcaccgctactttctttccgtttttctctattttcggtacttccatcctgtcaagataagaatctgaaatgaaattctcaatactgctaaaatggattggactgctctttcttcctaaaacacaatggccttcacattgattttcatggttacatacggtggagcagacagcggacattggattatttgcaaaaaggatttcaccggcttccatcaaacggttttcaagtaataattgagtgatttgtgggataggtgtatgaatcggacacccttgctgacaaagtggttttttacatttcaggcaacgttctgcctcgtcgataatatgtaatttcattctgttcttcctcctgaccttttattcagatagaaaatgccgaccacagtttcccatgaccggcaataacttatattcttacaaatggttaatcttagttttctctttctacagacacattagatactttttcgtagtattttacaattgcactgtggtcatctttttcatttccgtcagcctttaaggactgcataatctccatgatctctgctgtaagcggaagagatgcatttactgcatgtgcagcgttcagcgcattgttcaggtctttgatgtgaagttcaatacggaatcccggcttgaagttgtgatccatcatcatcggtgcctttgcatcaagaactgtagaacctgcaagacctccacggattgcctgatatacaagctccggatctgtcccggctttctttgccagtgtcagtgcttcggatactgctgcgatattcagtgcaacgattacctgatttgcgagttttgcaacatttcctgatccaagttctccaacatatacaacagaacctgccatctgcatcaacagttcataatatttgtcaaatgtctctttctttccaccaaccataacagaaagtgttccgtcgattgccttcggctctccgccacttaccggtgcgtccatcagttcaattcctttttctgcaagctcagcaccaatctttttagattctaccggatcaatagagctcatatcaattacaactgttcccggttttgctgcctctgcaattccaccttctccaagacatgctgcacgtacatgtggtgagtttggaaccattgtgatgattgtgtcacactctgctgctacttcagctccgctttttactccctttgcacctgctgcaacaacctctgcaactgctgtctcattaaaatcaaatacaacgagctcatttcctgcttttaacaggttcatgctcatcggttttcccataattccaagtccaataaatcctactttcattctattatttcctttcttttaacacatctgtttcattgcttcatgcagcagcttaaagctctcttctgactgctctacataaggagaatcaatcagatacgcttccagaatatcaagattcttctgcgtcggctcgattccaagctcctgcaaagttaatggcatgtccatccctttcatgaacagacgaagtgcctctttatcttcacttaatttattgtaataaagctgtgtaaacagtgccactgccacgatttctccatgcagcgcatgctctgcttcctttgtaaaataggttcgtacaccgtcatacatcatatgaccaagtgctgactgtgagaagcttttcgtgatgttcgcgatcacaccggttacagctatattgataaatgtaatatcttccactgcttttgtcagtctcttatgacggatatcttcaattgcctgtgcaccatactctacaagcacctcgtaagtatactctgccatcttgtaggcactgaacagatcgattttattttcactgagatacatcttcggcttgccgttctgtatctcgattttttttgccatcgcatccaaaattccggctgccgcataacggattgggcattctgcgatcacttgcagatctacaagaactgcatcgacttcatgttcgaatctccagcagtccttcttcgcaccttccggcgtatacataacactcattgttgtaaatgcggcacaagttgcgattgatgtcggaatgttgacaactccggtatccgtatattcaccgactgcttttgcaaaatccataacaagtccgccaccgattccgactacctcattacaattttctgctttgcatttttcagcatattccctggcagcttcataagaacactttccaccatacaggtgcaattcatactcaagtcctgccttctcaaatcccggaatcatccgttctttcactgcattccacgctctgtttccggcaatgataaatgctttctttccaaaacgtgaaatttcttttccacactcttcaagtaaattcttttcctgtctgtatctcccggctccgaatttaattgccgggtctaaagttactttttccattttcccgctgcctttcctcttctgtcataatctatcttttaattggatgttttggattctctccggaaaggacaagatgcacatcttccgctacatccagtgcaatccgatccatacattccaccgtattggaaccaatatgcggtgtcaggagcacttgttccagtttcaataatggattgtctttttggggtggttcttctgagaacacatccaccgctgcacctttaatctgactgttcctgattgcttctgctaacgcctcttcatcaacaacgccgcctctggaaacttgaatcagggaagcggatttcttcatcatggcaaactctttttttgaaataattccctggttcttttctcctcccggcacatgcagactgatataatccgatgtttgcaaaagttcttcccaggatacgatttctacatactctggaatttctttcccttccggatgcggcacataagaaatgactctcatatccagtcccagtgccgcctttcttgctacctcttttccaatctttccaagaccgatgatcccgagtgtctttcctgccacatcggtccctttcattgaaaattttttctgaaaatctccattccttaccagttcttcggattctttcagacgttttgcaagatttaaaatcaccgttatagtgaattctgcaacagataaggtcgtcgtgtccggtgaataagtcgtataaatccctaactcattcgcagccttccagtcaagattgtcatatcctgccccatgtctggctatgattttcaggttctttcctgcttcaagtatctccttgtctacttttgcagttcgctgaatcattgcatcacatactgcaatatcattttttattgattctttatctgtctttccgctgccgcggactatctcatagcctttttctatgagatagtcctctcccgctgcagcgattggctgaggaatgtaaatcttctgtttcattttctactgtcgttctccttatcttacaaggcaaggtttctttggatcgaatttccatcccggaatcagatactgcattcctactgcatcatctcttcctccaagacagttatcaaggtacagctgatgtgctttcttcacctgctcaagatccacttcaataccaagtcctggtttctttggaacttctacacatccgtctacaatctgaagtggctcttttgtcagtctctcaagaccttcctgccagatccagtgtgtgtccagtgcattgtactctcccggaaccgctgctccaacctgtgtaaacattgcaagggagatatcaaaatggttatttgaatgagacccccatgtatatccaaaatcatggcacatctgagctacacgtacagaaccactcattgtccagaaatgtgggtctgcaaggatgatgtcaactgcctgagattccagagagtgtccaacctgtctccagtctgtagcgatcatgtttgttgctgtcgggaaacctgtacgtctgcggaattcactcataatctctcttcctgagtaaacaccttctgctccgcatggatcttcacagtatgtaaggattccttccattccctttacatattcaactgcttcttcaagaagccatccaccatttggatcaaggtcgattcttgcgtccggaagtgctttcttcattgcacggatcacatccatctcttcgtttcctgcaagaactcctcctttcagtttaaaatctttaaaaccgtatttctcttttgtagcaagtgccatctctacaatcttatctgctgtaagtgcttcttcgtgacgcagacggtaccatgcacaatctgaatctggctctgcatcatacggaagatctgtcttgttacggtctcctacaaagaagagatatccaagcattcttactttatctctctgctgtccgtctccgagaagttcacaaaccggaacaccaagctgctttccaaggagatcaagacatggagcctcgatcgctgtaattacatgaactcctgtacgaaggtcaaatgtctggtttcctctgacatcttcctcccccttagaatcaagatgtgcttttactttaagcagtgtgctcttatactcagcaacccttgttccttcaacaagcgggatacattcctcaagtgcttttgtgatcttctctcctcccggaacttctccaactcctgtctctccgttctcatcataaagaacaacaatatttcttgtgaagtatggtgcgtgtgctccacttaaattcagttccatacagtcttttccggctactggatatacttccatctttacgattctagacataacaatttctccttttatacacgaactttttctctatctgtttctattctacttttatttttacttcagtgatcggaccggagattgacttgcagtccgaccaccgaaatcatggcagcaaattttagtttattaacattttttaataacttcttgttttaaacaaggttcatatctgcaagtactttatgcagcttctctttctcttccggtgtcagttcgccgatcggatctaagcattttcctaccggaattccttcctgaacaagaccttccttgattgctgccgggaatgttcccataccgcatgcaatacggaacggagccaatgtaaactgtgcttccagagctccttcaagatctcctgcaacgtatttatcatagatatccgctgcaattctcggtgctacatttgcacaggatgcgattgctcctgttgctccgtagcaaagagctgcgtagatcaaagtatctcttcccatcagtacagagaaatcttttcctcttgtcagacggatatactctgcagcatttgtcatatcacctgtactgtcttttacagcaacaatattttcaatatcagcaagttttgcaactgttgccggtgtgattgtcacatttgtctttggtttattgttatacatgatgattggaagtgttgtattttctgcgattgtcttatagtaattgtacaactcatcctgtgtctgggatacaaacattggtgtcagtacggaaactgcatcaactccgacctcctcacagatctttaccagtctgataactcctcttgttgtaatatggcttgctccaccataaaccggaacacgtcctgctgtctcatcaacgactgtctcaaggatctttctgtatgtatcatcatcgaatgcgtagaattctccggttgttccaagtgggaacaaaccgtgaactccgttgtcgatcaggtgatttaccatctgtcttaataccggatagtttacttcaccctcgtctgttaatggtgtaataattggagggataattccctttggtacgaatgtcataataaaaaactcctttcaatttataacacaaactgtaataacagtaattctataattccaactcctgccatgatcaatgacactgctgttttacatcttacctgatcttttaattctgtcagaccgaacattccattgaatacccagaatccactgtcattgaagtaggagaaggaaattgctcctacacaacaggaagctgcgagcaagattggggatacactgatagctgccatcagtggtgctgtcagggatgctgctgttgtgattgctactgttgcagatccaagcgcgattctcatcagtgctgcaatgataaatggaatcaggattgccggaagcggaagtcctacaactgtctctccaagaacatttccgataccgctgactttgattacatttccaagagaaccgccggcacctgtgatcagcatgataatacctgtatctttgattgctgtatccatgataccgataacttttttattatcttcttttcttaccagtccatagattgcaatgattgttccaacaccaagtgcaaagattggttcacctacaagactaatgattgtgtttgccacgccttcacctgttccaaacagtccccagaatgttttaacaaaaatcaaaacaatcggaatgataatcggaagaatagatgctgtgaatgatgggagattcttctctcctaccagcttttcaacttcttccatggatttgatatattcttttttgaattcttttctttcatatccatgtccatcttcattcggaatctgataaattttctttccaatatatttacagtagaatactacaacgatcagcatcggaatagagattcctgctccgatcatgatcatctgtcccacatcaactccaagcattccggctgctgtcagcggtcccggtgtcggcggtaccagacagtgtgtcagctgaagtccacaggccagtgacagtgcaagtcctacaacagagattcctgttacagaggacattgcttttacaagtggtgcaaaaataacgatcgcagaatctgcgaataccgggatggatacaacccatcctgtgattgccagtgcccattcttcttttctcttaccaattacacggatgaaagtaaatgcaagctgttccgctgctcctgaaacttccaggattccacccatcataactccaagtccgattatgataccggtacttttcaacgtgtttccaaatccatctttaatagcggtcataactccgactgtcgtttctccggctgcatttgtaatatctgcaaccggcatgcccccgatcaagcctgtgatcaatgctgcgagcaataatgcaataaatgtatgtaccttcgtcttcataaccaggacgatcattatcgcaattccgatcaccagccccagcatcattctggttgattcactcatagttcttacctctcttaattctttttctcaacagatgtatcagaaatcttctcgtaatattttacgattgcactgtgatcatctttttcatttccgtctgccttaagtgactgcataatctccattacctgtgaagtaagtggaagtgctgcatttactgcatgacctgcattcagtgcgttattcaggtctttgatatgaagttcaatacggaatcccggcttgaaattgtgagccatcatcattggtgcttttgcatcaagcactgtagatcctgcaagacctccgcggatagctttgtatacaagctccggatctgcatcatttttcactgcaagtgtcagtgcctcagacactgccgcaatattcaatgctacaatcacctgatttgcgagctttgctacatttccggatccaagttctccgacatacactacagatcctgccattgccattaataaatcatagtacttatcaaagttctctttgcttcctccgaccataacagaaattgttccgtcgattgcctttggctctccaccgctgaccggtgcatccattaagtcaattccctttttgttcagctctgctccgatttctttcgactgtaccggatcaatcgaactcatatcaattacgatcgttccttcttttgctgcggaagcgattccgttttctcctaaacagacttctctgacctgaggagaattcggaagcattgtgatgatcacctgacagttctctgccacctctgccgggcttcctgctgcctgtgctccctccgctgccaattcttctacgcttgccttgcttctgttatatacaacagcttcatatcctgctttcataaggtttctgcacattggttttcccataattccaagtccgataaatccaactttcattgttcttctcctctcagatttctgatattttgtattactgctatttcaacttgttcctaatcgtctttgataattcgcgcgctccttgttgcctgccttgcctttggtcaggtaacttatctatctgacatgcttattgtacaaaactgagtacaaagattccattgacagattgttcaatggagcgtgctctgatttatgtagatttcataagttttcattttttgaattgtgtatttcatttttatttcattatgtttcgtttctgttttttcttatttgtttaaatttcaatttctttttattcatttcatcatatgtaattatcttttcattttttgaaacattataaattctacacaaattctcacttcatttttatacataacaaaatacagtttttcacatcaaaaaaggagacagttttaaaccatctccctgtatgcatttacctgttcctatagtaattcatttccaccataattggcttctattccatactttttcattcttctccagagagttgtcgtgctgataccgagctcttctgccaccagtttccggtttccgtggaaacgttcaagcagctcctcaagttcatctgtctcctgagaacgatacacaagaatcctcttctctccatgagattcttccacatgcggaaacagttcgtcatataaattttgaagaacgacttcatcaatcatgcgttttttggctgtaagaacaagtcgttcacaaaatgaccgtagctggattccattccctgtccacttcagctcctgcagcttcttatatgctccttctgttacgctaagcggacggttgtatttttccttatatatcttcaattctttatcaaaacaatttctcagatcctccgggcgttcattcaatgaaggaatctcaagtaccaggctctgcagcatataatataattcctcgctaaactctcccttttccaccagatgtttcagatttatctttgatgatcctatgattcttacatccaacgtgtcaagtggctgtgcatctgttctcatctgcgccctgcttaacattgtacgcaaaatctgatgctgtacacgcaaagtcagatgctcgattcctttaataaataaggttccgtgatttgcctttatcattgcaccctttgcaccaaaagttgaaactgtatctccggcttctcttcggaaaagctcttccatctgatgttctttatccattccccgcatattaatgctgacatatggacccactttgcggatactattattgtgaattgcttctgccaaaagataatcctctgtacctgcctgcccataaatcataactgcgtgttcagacaaggcatacattttcgcagtttcaagcatttttcgcatttgtgcattctctgtctgaatatcttcaaatttggtctgcgccgcaaatccatgcagtagcatatctccctggatatccttggtcttttttgaattgtctgccagcttctgaagagacaaaattgctcctgtaatctgattgtcatactggattggtgcgatcattgccatccaggtctttttcctgacagaaacagaagtggaatagctttcgctctttccgcttaaaatattctcgatcaagagcgaatcgattccggggagaatctccgtcagactctttccaaccagatcttcactattctttcctaacagattttcaaccagtttattgactacaatcacttttccttctgcgttcaccttgacaattccattaaaggacgtatccagtactgtttcaaactgcgcagtattacgcttctcactttcagctgcataggacgcattcttcgctgcaagaagggcttcttttagcgattcttccgtggattgataaaacagcgtcgaatatcccatcgtttctgctgctctgcaggttccttctccaccaatgatcagatccggtctttcctcaaaatctgcaataatgctttcagcctcttcaatacgttttagataaatcacatccagtcgtatatcaaacagctgctccatatatgacatatcacagagcatattttcaaatgcgatcaatgcaatatgcggatgctctttcttaagaatcgtctttgctttctgaatgagcagaccaatctcctgtgcatgaaaacgaatctcaacaacaggaatatttgtatattctttaattaacttcgcctgatatcctctggcaaccagaatatgggctccagcctccactgcaattcttgctttattcactgcatctactgtatgcacagcctcaagatagaccacatccagatgattttcttctataatttttctcgccggttcgaccatccgctcttccgggagaagcattcctattttaaccataataaatgcctccgactataattcactttcttttaccttatcacgcacttcactattttatcaacaaatttattccctactattataaaaagaaaaagaatcttctccgcagcatttgggacaagattctttttctgttcgtgtatttgccggccgcagcacgctctgcggccagctctatattctttttaggagactaagaatttttcaaaaacatatcttaggtgatcggtgccggattaaagatgcacagatcattgtgaagtttatatttttctgcaaagctctgctcttttccgcttgcaaccgcaataattttattaaataattctgtaccgatatctgagatctgtgcttcacctgtagcaaccggacctgcgttgatatcgatcagatcctgccacatctctttcatctcatttctggaacagactttaataaccggtgctgctgcaagtccataaggtgttcctcttccggtcataaatacctgtagtgtgataccggatgcaagctggcaaggtccacagacaatatcactggccggtgttgctgcatagataagacctttctttgacgggcgctctgccggagataatacttctacgatcggtgagcttcctgatttagcaattgatcccattgctttttctacaatattacaaagtccgcctttcttatttcccggagttggattagcgcttctgtcaacatttccctcttccagataatgatcataccatttcatctctgccgcaagtttgtcgcagacttctttgctcacacagcgttctgcgatataatgtacgccatctcttacttctgtaacttctgaaaacattacggttgcacctgcatttacaagcatatctgctgcgtatccggcagatgggtttgcgctgacgcctgaaaatgcatcacttccgccacactgcataccgatgcaaagatcggaaagcggtaatgtttctcttcttctctgatcaagaattgcaagttttttatctgccatctccataatggcatttaccatggcatcgaaacctttctgttcctgaagaacaattacattttccggggaaatatctgcctcgtccagcaatttttccactgttaatttttcacatccaagcgcaacaaccatcacctgtccgccaaaattcggatgatgtacaagattgcgtaaagcacggatcggcactttcgcctccggtgcattgattgcaacaccacatccatacgcatgattgattggaactacgtcatccacatgcggatattttggaagcagttcttctttgattctcttcaccgccacattaagtacaccggttacacactgaaccgttgtgctgattccaagaatatttctcgttcctgcatatccaccatttggattcctatatccttcgaatgttgttaccggcggtgtcggaagatctgttacaatcttttttccatactccatatcatcaacagatggtggtgtcggaagctccaacataaattcattgatccagtctcccttttcaatatcttccagagcataccccagaataacaccgtaacgaatcaccggctgtccctttgggattctctcaagcgctactttatgagcctgtggaatatcctgacgggtaaccagatcttctgaaacctgtgttccggctttgatttctttcactgcaattgcaacattgtctgcttcattcacttttacaagaagtcgcttagccacgaatgattcctccttttcgcttagcaagaaatgtttcatttttctttgctgttctttatggttttatcatacgctcttactgttaataagtaaaattcattgtttttctacttctcttaatttttttaatagtttttcttgtcattccatatcggtcgaattatactggaaatagaaatgtaaaggctcattcacagaatcagcagaaaggttattcctatggatttaaaacagattgaatatattttaaaaattgcagaagaacaaaatattacccatgcagccgaaaagctattcatcacccagtctgccctcaaccagcagcttctcaagctggaaaaagagctcggcactccgctattctaccgttcccggactgactggcacccaacccctgccggcgaaatctatctcaacgcagcaaaagacattcttcttataaagaagaatgcctacaatcagattcacgatctctgcgaagtacagaaaggtcatatcactctcggattcactcccggccgcggaattgccatgttcaccagtgtttaccctaagttccacaatatttgtccaagtatagaagtggaaccgattgagcgcagtgttcgtgatcagcatccgctactcctgtctggtgagcttgatcttggttttatgactttgaccagatcgcagcaaaaatcaggaatcatctatgaaacactagcttcggaagaaatggttcttgctgttccaacaaaacttgtgactgctttagatatgaggaacggcgatctggctctgctcagagaagagccttttgtcctcacacagaaaacctctaccatccgggagatcgttgattccgtttttaaaaatgccggattcacccctaatgttctgttcgagacttcgaataaccatgcgatcatctctatgatccatgaaaatatctgctgtggaattttaccgatgtattatatggatccggaagatgaggcaattacctattttcaattacctgaccatccttcctgggagattgttgctgcatatcgcaagggacattatatcagcaagccggcgcggacactgatcgagcttgcgggaaattatttctactcttgtaacacttcgcttgcagtgctaaaataagcgcagaatagatagatgccgtcatggcgatatcgcaaacacatacaacaggctcggactttcagaggtgatataaatggaatcaaagacagaaaacagaatcaacgaatgcatttcacatctagacattacttactcttatcagctggcaaagcagatggagactcacaaaaccaatccggtactcggtttccgaactgccggttctgatgcggaacataagacaggggattttttatatgaagaaatgaaacgcatcggacttcagaatgtaacgaaagatgaattttggctggattcctggacctttgaacgtgctgtgctccgtttccaggatcaacatggagaactgcatacttgtcagatgggtgcttatcagacgaattttgagacagatggattcgagacttatgatcttgtctatgtcggccgtggaaccgcatcggactatgaagggctcaatgtccgtggaaagctcgttcttgctgatatcaaccagcgtgatgaatggtggatcaactaccctgtctatcaggcatatttgaaaggtgctatcggactgattgctgtccagacacagggttatgctgagattgatccgcgggcactcaacgctcaggatatcgccggaccggaatatgcccctgcattctctctttcgagacaggatgcttcttatttaaaagaacttctctgtcccgaagatcctgcagtatctcatccgtcctctgtcgcagttgaactcaacgcctcttcctgggttgaacgtaaccgcccggcttataacattaccggatatcttccgggaactgccgcttctgaaggggacgaccggatgattctgctttccgcacactacgattcctattttgacggatttcaggatgacaattgtgcggtctctatgacatttggaatcataaaggctctgattgacagtggctatcaaccgcgctatacaatcgcggtatgtgcccttgctgccgaagagtggggtgtctgtgattctaaattcgactggtcaaccggagcctggaaccaggtattccgtgttcacccggaatggcagggccgcgtgatcgctgatctcaactttgaacttccggctcacgcccataacacacaggatgcaatccgctctacttatgagtctgctgattttctgaaacatttttgtgaaaatataactgttccgaaggaggcttaccctgatggactgacagtacttgcaccaatcgagacatggtcggatgatttttccatcgccatctccggtattccatctaccgtaaatgatttcagcgcaggaccgtttatggaaacgcattaccactcccaatatgacaatgaagagttctatcaggaagcagtttaccgtttccaccatgagctctatacaaggcttttagttacactggatcagctgacacttccgccacttgacttttccagacattttctggcaatgaaaagttccgtcgccgactgtcttgcagcacagtccaatgccccggcagaagtattggaagaaattccggcgcttctggaaagtatttcaaaggtatgtgaatctgccgatttattatatgaaaagattcaggagatcaacaaccatactgtttccgctgacttcccaatggtgtccggactttcttctaaactgctgcacattttccggaagatgcaggactacttcgtccgcctcgactggcaggacgcagtctgcttccctcatgctgctgccagtcagaacctctgtcacctggagcaggcagtccatgcactggaaagccagaacatcactgccgcactggaggcactctatgaagttgataataactgctacgcttttttattcgatgaagaagtctattatcactttacggaatatattttacatcaaccaaaagaccgtctgatgtggggcgccggacgcattcttcaccatgagaatctctatggccttgtccagcgtctgaaagaactggatcagatggcaatcccaggttctcttgatgttgagatcagaagacttgaagccgctatccgccgccagcaggcctacttaaaagatgatttacattatatgaaacaatctgttgataaaatccaggctttgataaacgattgccttgaaacatcatcacattataataaagaaaagaatggagaaaaccaatgaatagcgataagctctacaaagtacaggaacaggatcttgaccgccttaaagaaatactgaccgtctgctttcagaacgacccgctctacagcactctgatcgaagatgaagcaacaaaagaacgtctgctgccacatcttcttgagtgcgacgtaactgaattatttgaaacctgtgaagtctttgctgacggccctgaattgaagggagtcctgatcctttctgacgaatccgatcaccgtcatgcattttataattattttgtcagcctgaaagaaagcctcatcacagacggctggctgctccacgaggatccgactatgaagacatttttcaactttgtcctcggaaaagattacctcaactccgcttggaccgcccagcttcatgaaacccgaagacttcatgtcatctacctcgccgttgatccgaaatttcaacatcacggtctcgcagaaatgatgatgaatgaagtcattgcctgcgccgatcgcaatgatatgatgatctctcttgagacacacaattcgaaaaacgtaccattttataagcatcttggattcaagatattcggaatcgtggagaaacctcattttggattgaagcagtattgtatgattaaggaactgtgatataataatagggaatagaaaaccccgaaagtctcacacactttcgggatttttgtttagcttttctcatgaacacttcatatctctttagcctactggcatcataacatatgtaattcaccaatacgatatgcaattttctcaaatcttcaaattttcatactacatgcaatggaatcagtatcctcaactcaaaccagttatctctcactcctgctgtcacagagcctccatactttttcactgtactctgaatactcttcatcccaaatccatgaaaacgcttgtcctttttcgttgtctgtggaattccgttcttgaacacaatcttctcctcacaataattctccacgcgaattctaagaaagctcttctgttctgctaccgatagatgaatcaagcgtttttccttctctgggattttctctgcaccttcaatcgcattatcaagaatatttccaaaaagagcgctgatatccatctctgccataaaattcaatagtgttccatctgccacacaggtgaatacaattcctttattctgacaatacagacttttacttgtcaaaactgcatccaacactttatttcctgtcttattctgtgcttcataagacttaatctctttctccatctgttccaaatactgcgttgatttctcactgttagcctctgccttcagaagcgtgatctgatgcttgagatcatgatatttctgattcacaatctcaatgctttcctgggacaactgataattcttatactgcatttccagaatattctgaagcgtatccacttcaaacttcatctgaagctcccgcatctgaatgtgataagcatacagaactgccataccgcttaagtctaccagtgtacggatcgtaaacatctcccctgcaaaacggctactgaatagggttccttgatccaggtaactaatgttactcaccacaaaaactgcagctgtgataataattaccgtgatcagttctctgctgttgacgctattctcctccgtctcttctttcagatacatttccagaaaatacaacacgccaaaaacacttacataaacccccaacagttccaaccatttccaaccgaaccattttatatcatcactcttgattgtaataaaatagaaatagatctgccaacacaaagatgcggcaaactctccacaaataaatgctctggcgcaatagtatccggcatcttttaatccaaaatcacagcacagataaatatagaacaacagcatagaaatcgaaaccatcatacacggaataaaaagcatctgtcgtacaccgtctgtcaattccatgaacccaacaattccgccaaaaaatattatatgaattatccaacgtttccatcccttcacgccgtctctctgcttgtttgtccgattcacaagaaatgccgccagaaaatacgcaatggaataataataacccggtgtattaacaaaagtcattccattcattaacgtcccacctcattcatataatcattcaacgcatccatgaatgctttcttccttgcgcggcttacctggatcacatctgaagctaccgtcacatcatttccacgaaaatcttctacatactccaaattcaccagataacagcggttacaccggaagaactttgttccacccagcgtgtcctccgcttccttcatggagcttttcgtcacgatatccccttttgtagaatgatagatcagatcgtgatctcgaacttctacataacaaatcttatccacattcagcttctttttcccacctttttgagcaacagtaatataagttgcttcttttttcttcactcgagtcaacgcacggtcaatcctctgtgaaaaggcaaagtaagagataggctttaacacatagtccagtgcatccactttataaccctgaattgcatattgtggcatattggtaataaatataataacaacttcattgtccttctcgcggattctctctgccgttgtcatgccgtccataaacgtcatttctacatccatcaaaatgatatcaaactcagccgaatagtccgtcacaatgtcttccccatccggaaataatgcaacacttattttctgattcttctctgttccataacgcacaagatattccttcagctgcgctgcatatgtcttatcatcctccactaccgcaatacggagcatcgcagttcacctcctgattttcttctgtcaatattcattttattttaccattattttgtatgtttttaaactcatttttccatcagacagtagcaaggagtactgctttcccgaaagcagcaagcaggcggctcccgttccccgagaaccgcctttttgcctgatatatgtattctattattcttctgttttcactactttgaagtaagaaccgatgatattcaaaaggattgccacaaaacaacatatcattccaataatcgcactggacaaatcactcattgtctgtgcatttctctcgaaagaaaggattgttgcaatactgttgacacgtgctgtaatgaactgtgcgaatgccaccatcatcagcgcgccacataccaacggaagcacatccataacaaagcttactcctaccttgttatatccgataatataaaccagttccaaaacgattgccacgatcaggcaacctacaattactgcatttactccaaggttactgaaataagctgtattacagttgatcagatagaaaacatttgctacaactgcggcgatcacggccagagctgcaaagtaaaaacctacggattgtttcttgataaaactcatctactatgccccctcttattgattcttcttgttacctttgatatacattgcaattgctgcaagtgtcagcagtgcgaagactgcctctgccgcggtcagtgcattgtcataccatgttctcacatgctcgattcgtgatgtagaattcagtccgtccattgcatttgaatttgcaattgcataattctgccatgtcatgtcattcttcagatcctgcatcaattctgcgtctttgcttacgttgtctaatgtccagtatggccattttgcgctgactgcttccattgtgctgtcacctgtgttacatgtcattgtcacaccacagtgtgccgcttctttcagtactgcatagtttgcatcctggataaagtcctcactgatcagtccctggaatccccactctttacgaagaatgttcatcaaaagtccgtagtgtgcatttcctgctgtacatccgatacggttgaatgttgtcatcatcgcaagtgtctgcgcatcctctacagatgcctgtactccacggagctcattttcacgtgctttctgttctgtcataaatgttgcaataccagaacggttaatctctgtatcattgaatgcaaaatgcttcggtgcgatcagaacaccatatttctgtgcctctgcaatgtaattggatgcctgataagctgtcagaactgcatcctctgaataatactcatgattacgtgcattataaggtgtacggtgaaggtttgttcctgctccccagaagattgtcaagtttgaccacagagagtagttgccaatgacctgtccgtattctgccgccagctgtttgctgaatgtctgtgcgattactggctcatttgccattgttccaaacttatagttcaagttcttgtcatccgggtcaactgcacatggatctggtgaacttgtatctgtgtttgcatactgtccaagtgtataagagttaattccattcggtccgtcattctgaactgcttccggagaagaaagggactcgatcggttttgtacttgttccaccaaatccgacacgaatcatacactcctctaatgtgatctgatccatcagttctgaccatttttcatctgcaaagtctgtattacccttgaggtctgcaagtgtcaatccattatctgttccaaatgttacagaatccggatctccctgctctgtgatctcatatgtatcattctgcatgatctgaaccatttcatccgtagctgtcaggtctttatatgttttcgggaaagttccactccagtcacttcttgtaagataagtcactgtgtctggcatgtaagtattcagatccatatcctgaagctgattctctactgctgttccattctctgtcttggcaaatgttgttgtatccattgctgcaagattccaggattttacatttacggcatcgcctgcagatgtcattccattggattcgctgtatccttgtgctgcaagcacgttattcactgcatcgtgtgctccatttccaattgtgaaatagtaatctcctgcatccaggatgtagttacctgttgttccggcttcatttgctgctgtgctgtcccaacttgccatatcctgggcatctgctgtgattgtcacctttgtagattcacccggtgcaagttcgtctgtcttctcataatcaagaagctgcactgctgccttctctacaaggtgctctttgtcataatctgtgtaaggagtagaagcataaagctgtacaacatctttacctgccacatcccctgtgtttgttacagtcacttctgctgttacagtcttcttctcaagatctacattcaggctgtccagagtctgtgtaaaggttgtataggaaagaccataaccaaacggataagaaacttcactgtcataagtccatgctccgcctgtagagcttcctacgctgtcagacgcatttccctgtccaagaactgtatctgcataacgtgtctcataatatttgtatcctgtgtaaatgctctctgcctcaacgatttctgagttgatggaatagtcagagtctgcatttgtccactcgtaatcaccgtaattctgtgctgccggtgatgcagagttgtctactgcataagtatctgcaagatgtcctgacgggtttgcatctccactaagcacatctgctactccgtagaatccatatccacccgggattcctacttcaagcattgcatcgattccgtcattgttcttgagctcatcaatttccattgcacttgcattattcagaagaacaatcactttaccgccattctgctcttttgcctttacagctgcatcgatcgttgcacgctctgtatcagaaagaccaagcgggtctgcctgattcagattctgttccggattcacaccttcttcaccaggagtatagtttgtattctcacctgctgcacgtgcgatcgtaacaatcatgacattgtagtcattcatgctgtctttccatgtcggctctgctttatcaagcttctcctgtgacggttccaggctggtaaatgttccaccaattgccggtgatgttgcacgataatatgttgtaactccccacggaagaacagcttctgacttaaagtcttctttcattccaagatacatgttttgtacggtcgggttcagactatatcccttcgcctcaaacgcctgtaccatatccacggtatcggcatctgttcctttattctcagtaagagtacttccaaaatctccgccttggattgggaaataactggaaaatccaaggaatgttactttctgtttctcatctgctgacagtggaagggctccattgttctttaaaagaactgtaccttcctcactcatgcgctctccaagatcttcgatggaatccagcaattctgttgtattactataatcagacttgtaaacgtaatcgtcctctgtctgattgtctgtcaccatctgtgtgctctgtgttcccaggaacttatcaatatccgtacggaatgtatcaattaccatagacgcggataaagacaatgcaagtaaggatgttcctgttgtggcaacaccgcgccatacacggcgctttgtctttttctctttcatgattaccctcctgtagataaatgtttatctaacaagcattccgcttcctcctcggaacggaatgctttgttattctattttatttcttcgctttcgcagccttcgccgcagcttttgcctctgcttttgctttcttctctgcaagttttttctgatactttgcttcttcttcctcgtagcttaatcctttcttcttgcagtaagttttcagctcttcttttctcgcctcttctgccagacattcagcttcttcctgttccatgcgaagtctctctgccggctcaatccattctcctccggctgcaagcactgctgccttctggttctcaagaatcgtcttctgatcttctttgatatgtttctctactttcaggaaactcatcagaactacgatcactgcataacagatcagttccattccaagataacagagcgttagcatactctgaactccaccgttctgcacagaagctgttgcatcatatccggttgctgtcagaagtgcattgataattccatttccaagtcctgtcataccaaccataatggctccataaacagacattgtgaatccatcactccggaatccgttctttgcttccagatgatcaagtacatccgagagaagcgccagtgttacatacatggccggaatggatccgattccttttaatataactcctgcacagacaatagtgaaactatgtacattgataaaactcaccagcccaccaacaacggaaactacaagtccaagtgtcacagctctctgttttccaagcttgtctgcgatcggccatgcaagcaccataccgattgcagtcggaagtccaccgatcaatccaagtgttcccattgcagttcctgccgctgcctccgtattgattccatcaaacatccatcttgcgtagtagctcatagaaccattctttacaagtccgccaaactgaaagagcaggaagtaaagaataatgatccaccaatatttgctagatacacaagctttgatctgctgactcatcggaagtttttcttccttaatactcagctttatattttcctctgtgatacgttctcttgtgaaaaaatactccagaagaattgccagaaatgttacaacacacagaacaaccatcacgattctccagttgttgtaacttgctgttgtatcaattactccgtcatgatctacaaaaaggaaactctgcagaagaatcggaacaagaatacttgctccaactccgactgctgcaactcccgatgcatttgagaacgttgcaagcatgcctctgtggtttgaatttcttgttgatagtgcgactaaagaactgtgtgccgtataatagaatggataagccactgcatagtacacgttataggaaatggcgatccatgccatctgtaccaccgggcttgcattctccggtgtcaggaataacaaggcaattgctactgtaaccaacggtgctgaaagaagcatatatggtcttgcctttccctgtgaagttcttgtattatccattagatgtccgaccactagatttccgataatcacaaagattacagaaatcattggaaggatggctgagaatactccgaaccttgatttgtctgtccatccaagcacatccgaatagtatctattcagataagatccgaaaatagcattggagatcagtgcacaaaacggtgcgataaaatatccgaggagcatttcctttggttttacgttcgcggaagtgatctttgtccggaacaacggattatcaaaaaatttctttttctccatctcactttccctttccttttataatttttcttccaatgtataacttccgcttccgaatttcttctcttctcctcccggaagttttacaattgctgttgtagaacatgggatatccacatgaagtgtgaattttccatcacttatccaccattcactggtaacttttccataggctgtgttgacaactcctcttgcctgagtcagtccaccgccaaccatcggcgcgatccgtactttcttcccaccaccgctcaacatctcgattccggcgatcctccggtacaggaaatctccgactgcaccgtatgaaaaatggttaaaggaaaccattcctccggttccgtcatcatcccctgtgttgcaggttccatcttctctgagtgcatcccaacgctcccagatagttgttcctccaactttcatctcatacagccaggatgggcatgtatctgtcatcaacatcttaaaggcatcttcttcatatccattgtctgccaacgcgaagagaatatatggtgttccaggaaatccagttgcaatatgataatcattctccctgacgattctcgcaaggtgcgctgcagtttttttcttatcctctttggaaagcattccataataaagaggaagcacataagctgtctgaaattctttcttcaccgtacagtctttctccatcaaaagatcacggtaagcctctgcagttttttcactgaggtttctataatatacagcatcctctttctctccaagcagctcggcaatttgagataaaattttgctagaatgagacatacatgctgttgcagtccattttccacgtcccatccacgcccacatgccgatacccggtgcacaccagtcaccataatgatgcagaagtttccagatatatttatgttttccaacagatccaaggcttgcccaaaatttacatgctttcatgtaacgcttcatcgttggatacattgttttcagaagtccgagatcaccacgcatcttatattctgcccatggagccagaatacaaacatccccccagtgatcaactgccatcggaatcattatctcccactgtcctggtacaacgaccagcggtactgtcaccggaattccaccgcctttattctgctcacttctaacatctttgaaccatttctcaaggaaacgactcatatcaaagttgtaagctgctgtcggggaaaatagtgcgatatctccagtccatcccattctctcatctctctgcggacaatcggttgggatatcaacaaagttcgactttgccccccaacggatgctgctttgcaacttgttcacaagttcattggtgcaggagaattctccattatcttccacatcagagtaaagagctattgcactcaattccacatcctcttccgctgcaccttccatacttacataacggaatcccatgtaagtcattctcggagaccaggtctgctctccgtccctgcaaatgtaaaccgcttcctgcttcgcacttcttaaaggctttgtaaacaattctccatccatcagaatctccgcatggcggaatgtaattttctgtccttttttccccttgatcttcgctgaaacaactcctgcaaaattctgaccaaaatcgtagatcagaacaccactcggtgcctttgtcacagaaacaggatgaaacacctcatgtgcttttactggtgcgccatactgcgccagaatctccggttgaagctttacctgttccttcgctgccttatgccaggaaatctgttccagatcaactgttgcatcatagacttctccgttataaaactctgtctctctgactgcaccatcaagtgtcacttcccaactctcatccgttccaatgatttcttctgttccatcttcatatgtaatacgaagctcgcacagaagagcctggcggtcaacataattacggtttactctcttataagtaaaggatccgactgcccagcctcctccaactacagcaatcagctcattttcttgctgaagctgtgctgttacatcatatgtctgatactgaagttgatttctataagatgtgaatcccggtgcaaaataaatatctcctactttctcaccgtttaatgtcatctcataaattccaagtgctgtcacatacattcttgctttcgttaccttcttgctacatgcgatctttttccggaatgtcattgtttttggtgaaattttcttctctgtgaaatgatattccccatcggtaatccactctgccttccagaaagtccccatacgtccagtctcaaaggatgtcgctgcttccgctacttctcccttgtcatccattacttttactacaaccgggtactctgtaaatggatccaacttctttcctgtatatggaacaagaatctgtgactctgtctctgtgctccagtctccaacccaaatctttgccttctttaatgaaacattctgacgatcactttcaatctgaaaagagactcttggctgttcctcatcggtcacgcagccttggctcaaatgttccactgtcagcctgctgattttcaacatgtattgtttctcctctcccattccattctcaagaatccccctttcaggtgccttgatttcctcggtgaaatcatgatagcactttacttcgtgtgcggtttaaaaaacacgcgaacggttctgtttttaacgttatttgcacgtactattttttgtttattttgtatagttttgattcttatttttctttgcctgaatagttgatttgtatcaatctgttccatttttgtgcattttgtatgttttaagttcgttttcttctgttttaagatcttatttttgtcgatttttactttttgtatttttgtaatttttgcacatcattgttaagttaaattccaaaagaaagtaactatctgatttcataaaattcaccgtagacagtccgtttcacttgtataagacgtaaaagaaacagccataaagaacacgaatcaaaatctgttctttatggctgtttttatatatgatcattgcagagtaacaactgttcttcctttcagctgttccccatcgatttcctgaacttccagtacaacgtctccacttccatcagcctgtaccacagccagtgcttctccccagtacgtgtctgtctcattcgtacagtatccaatctcattatacggacacgcatttccaagtcccagaagctttccacctttcacgctcactttcagaatccctcgtttcaatggtttcaccgttccattcttatctgtatattgcaaacggataaatgccagatgatctttctgagcgctctgttcttctgcaattgcgcgcagttctgtttcttttcctgctgtatagagtgtatttctggaaatctctttgcccttctgattatagactaccgtttcgagtattcccggctgatattctactttgaatcttgtatcacaggaatttttcagtgtgttacttcccactttctttccatttaagaagagatctactctcgcggctcttgcatacacttccacttctgcaacttttccttcgcatccttcccaggaccaggattcgattgcattcgtcatcttccatgctgatggggaatgcttctcacctgtatgattcaccggacgtactgcgattaccggacgattcgtcaattcgaatgctgtctttgtatatccagcttctgcaagtggctttcctgtcagatcaatacgtccgcttcccgctgtaatccatcccggtccgtgattgaattccggtgcataatctcggtattcccaggatccgacaccgacttccccgagataatccatccctgcccatacaaagtctccgacaattcttgggttcttctttgccatctcccaaaaagtatatgcatcatcgcagaatgtctcgcttcccagaatcaaacgctccggatatttctttaggtcatgctgataacgtttgattccataattgtatccggcgatatccatgttggcaaaagtccctctagtcttcacatcacatccatagaaagttgctccggttttcataaatccgcttcccataagtcctgcaagatcattgaagaactgacttcctaccgctttcttttttttctttccttttgtcttctccgcctgctcggcttcttttttcgccttcttatcactgtagaccccaaagccaatcgagcttaagaaattgaagaaaatattaattccgcaggaaactggtcttgaatcatccagtctgtgaagatattccgtcatcattttcgttagatgaatcccttttttctgtgccgtctcagaaacctcatttcctatagaataaagaatcacagatggatgattgaaatccttctccaccatatctttcaaatcttgtttccaccactctttaaaatagttcacataatcatattctgtcttatggatataccatacatccacaaactcatccataaccaacattccttgccggtcacatgcttccagaagcgctttggaacatggattgtgtgcggatcggatcgcattatatccattctctttcaagatccggatcttacgtgcctctgcatcaggataacagcaggctccaagtacaccattatcatgatgaatgcaggctcctcgaagaatcacacgttctccattgatcgtgattcctgtttctttatcccatttcaaagttcggataccaaaaataacttcttcctggtctgtctccatgtatttattctgtccattctcctgttccgctgcaaatgtcacacgcagccgatacagatttggtgtattcacactccatagctttgcatccggaatctcaaactgtttggtcaacttctcatctgtatgaatttctgctgctataatcacatcagaaccagcatcagcaaccacttccagctttacttttcccggtgcattcgtattcacctctgcctcgatcactgccggatctacactcagcgtgcggacacggattttatttctcaaaatatgttgttttggtctcacatacatccagaccgggcggtaaattcctgcgcctgaataccagcgactgttcggctggtctgcattgtgtgcaatcacacggatctgatttttctccccatatttcagatacggatctgcatctatataaaaattggtgtaaccatacggcctgtaagcagctttctctccattcagatacacttccgcgttatggtaaacaccctcgaattcgaaactgatttcctgtttttcatattcatccgggatttcaaattctttctcataaatataatcatacccttcaaaccatcccgtgttgattccacctgcactatcctctgttctcttttcagaaatcatcgcatcatgcggaatcatcacttcacgttttaccgtctcttcccctacacggcaaaaagtccatgcctggttaaaatcgatctttttcatattcactgcctttccctttatttttcaaatgaaacttatccctagatcaaatgtgagaatgtctctcacaaccgatataactatattaacgtttcttcacttgtaaaaatggaaatacacgtgaatggtttcaattcaagcgcaaatagtttcaatgcgatcactgaatcataaatgttctgtacacctgttccgcagtatctgccaggtttctctttgcattttcattcttcattgcctcttccagcgtaaccacaccacgcaggatagggaaaaatgcatcaataccgtgttcattacattttctggcatctctttcgactgcgcctgcaaatgcaagtaccggcttgccgtatttctttgcaagtgcagccactccaaccggagcttttcccattgctgtctgaccatccatccggccttcccccgtgatgacaagatctgcatcctttacatactcttctaactgtgtctcttccaacacgattttaattcctgattccaacacagcatctgtaaatgtgagaaatgcgaatccaaggcctcctgctgctcctgttccttcctgctttgcatctgcctttgggaatttttctttcgccaatgctgcataatatcctagccactgatccatctgacagatcatctccggtgttgcacctttctgaggaccaaatactgcactgcatccctgttctccgcaaagagcatttgttacatcacatgcaatcttaaacttacactcttttaattccggaagcacataagtatctgtgatttcctccaaaaccttcaaaccctttgcaccaaatggaacctgatttccgtctttgtcaaggaaaccgtaacctaatgcctgaagcatcccgactcccccgtcatttgtagcacttccgccgattccgacgagaaaacgtctgcatcccttgtcaatcgcatcacgaattacttctcccacgccatatgttgttgtattcagcggatttctctcttcatcagaaaccaatgtaattcctgctgcccccgccatctcgatcacagctgttttcgtgctttcaatgataccatactcacagatcaccggatcaccaagtggtcctgtcacctgtactttctgtaatgttccattcatccctgataccagtgcctctactgtaccttcccctccgtcagctaacggtcttacaatcacttctgcatccacatccactctttggattccctctgccgctgcctgtcctgcttccatagaagtcatacttcctttaaatgaatcaatcgctgttactattttcataataaactcctttccatgtctgttccgtgttttattaatattaggataccaaatttcttgtttctcgaatatgttacacgtaacattatttcaaatttattctattattatttgttatgcataacattttatagtaaaatggtaactgttcagagccaagcaaaatttcataaaacagatgtaaaatgattgcatttttaagactgtttttgaaattttatttggcggatacgccacaccgacgaaatgcgtagcattttggaggttggctctgaacagttatatcaaaagaaaggatataataaaaattctatgataactaaaattgaccgcgaactcgcagaacaaatcgtaaatacaatcaaagatgtctgtgatcatgacatcaactttattgctccatctggtatcattctcgccagcacagactcatcccgtgtcggaacctttcacgagattggacaacaggccgctgcttccggttctgtactggaagtaacagaagacaacaatttttctggcacaaaacagggaatcaatcttccgctttatcataatgaacatctgctggccgtcatcggaatcaccggtatacctgataaagtccgcagttatgcttatctcgcagaacgcatcaccaatcttctgatccgggagcaggaactaaatcagtacagccgcagacaggccgataaaaaacattttgtcattcagtctttgatcagaaatgaaaccgacaatcaggaatacctcacctcctgtctacatgaatttaagattgatctcaacacaaagaaaagaattgttcttattcgcacaaataaacaaaatccaattacaaaccgctctattttagaacagaaaattcaacaaatgtttgcacaggcacatgtctgtcttcacacatttaattatccgggggattttattgctttgatcgaagaaactgattttgaaaaacagaattacatttttaaactctttgcaaaagaacatttcgatattttagatattgcagttggaaaaccgacatcactcttccagctccatatctcctatcaatctgctgaaactgctttgcacagccttataatttcatctgaacactatgttatttttgatgatttgacacttgaactgattctttctacgatcacaccggaaaatcagaaagaatttttagccaagacaatcgcaccgctcaatgaacaagaactgcacctgctggaagtttatttttctgaagaaatgtcccttgccgccacaagtgaacgactctttctccataaaaatacattgcagtataaattgaatgcgattcaaaagaaatgttcactgaatccgaggaaatttcaggatgcagtgctgctttatctggctgggaagattaaataaccgtacaacttgattttagctggggtaaaaatataccccagcacaatcttgcgctttcatcttggtaattgaattgccgaggattcccgcttattgtcctaaaataatggtttttgttttcggataggggaaatagcatatatcagggacattttgagtagttaaaggagagtctatttttagaggattctctccattggagtattctgcattatattcttttagtgacaaaaaattattatctgttggttgtgcagagtatgttttgttataacttggaattgataggtaatcttgagaatttgtttttagaggattttctccattggagtattctgtattatattcttttagtgacaaaaaattattatccgttgggtgtgcagagtatgtttcgttataacttggaattgataggtaatcttgagagtctgtttcgtgtacatatattgttatggcagatgataaaagtaataaaaatgcggaaaataaacatataaccttcttcatataatttcccctttcaataaaaaatttgatttgattttttataacttccagtggaattacctctcttttaacaataaaatattgatttgaacaattaaaaactgtttatatacataataatagtagtattttctgttaattgtcaataggatttaatacattgaatatatcatcaaaagcatactcgttgaagtaggaatgaaacatagaagtgtataactttttataggttttcagtaacgtccctgtactattcttctaacaatcgactttccaaaataatattttcagttttctgttcactgaaaaagatagacctctacgctaaattttattaaatacaaacacgtttgagatatggatatcattctacagaacatctgtttcctttccatctcaagtagaattcttctttcgagaaagcagaaatcaaatagcgacagagattttaccgatagacagacattgagggattgattcaggtgactgttctgtgtgcttggaaagacttaaaaaacggaaggttacgttaaagcaatgcgaggctactgtctgaagcggcagcgagtttgccgaacattgctttgtttttagtaatctttcgtttttcttagtctttcctgtatacagaacccggagcatgaagcaatccctcaatgtctgtctattagaataaactttatcagcgctatctgatttcgtccgcactcgaaaaagaatccctccgttaaatctttactccccctgtttcactttctgccaacatgtgctataatcgtaaaagcatgaatgttgcttatcattatctatacgcagcagacaaataagcaaaagaactagaacagaataaatcatttaaggagtataaaattatgaaaatcattgtattagcaggaggcttaagcacagaacgtgacgtatcactttcttctgctgccggaatctgtcgtacattagttgaaaaaggacatgatgcatttcttctggatgtattcatgggattagagaatgcgccggagaatctggaggatgtctttactcttccggatcacggacttgagattgtgaagaatatcagcacagaggaaccggatcttgaagctgttaaggcttcccgtccggatcagtcagactgcttcttcggcccgaatgtaatcgaactttgccgtctggctgacattactttcctcggtcttcacggtggggaaggagagaacggaaagcttcaggcatctttcgatctgcttggtattaaatatacaggacctgactctcttggatgtgcggttgcaatgcacaaaggtgttgcaaagcagatcttccttgagtctggcgtagacactccgggaggtggaacgatttataagaactctgaagatcagtcttaccagtcacttggtctgacacttcctgttgttgttaaaccttgctcaggtggttccagtatcggagtttatattgtaaatacagatgaagaatatgcagaggctctgaagaagtccttccgctacgaagatgaacttgttgttgagccatacattaaggggcgtgagtttgcatgcggtatcattgacggaacagcacttcctccgatcgagatcatcccgaagacaggattctttgattatgcgaataaatatcaggacggagctacttctgaagtatgcccggctgatattccggaagaagttgcagagcgcatgaaggaacttactgtaaaagcgttcaatgcactgaaacttaatgtttacagccgtgcagacttcctgcttgacgcagaaggtaatctgttctgcctggagatgaatacccttcctggaatgacttccgcaagtcttctcccgaaggaagctaaggtttatggaatcgaatacggcgatctttgcgaactgatcattaagaagtccatggaggcaagatattaatgaaacatatgacattatctgaaatcgcagatgcctgctgcggaatttattgcggtgatcctgcattcttagactgtgaggtctcaagtgttgcgatcgacagccgtaaagtagtaaaagatactcttttcgttgcgatcaaaggtgcccgtgttgacggacacagttttatcccgcaggtcatggaagcaggtgcactctgttccctctctgagcaggatcttggtgacgttgattatccttatatccgcgtttcatcctgcacagaagcattgaaagacttagctgaacactatcgccgttccctcgatatcaaagttgtaggtatcactggaagtgttggaaagacaagcacaaaagaaatgatcgcatctgtactttccgagaaatataatgtactgaaaacagaaggaaacttcaacaatgagattggacttcctctgaccgtattcaatatccgtgaggaacatgaggttgcagttcttgagatgggaatcagccactttggagatatgaaaccactggctaagattgcccgcccggatgtgtgcgtgatcactaatatcggatatgcacatcttgagaatcttggaacaagagacggaatcctaaaggaaaagagttccatgacagactacatgaatccgaaaggttctgttatcttcaacggggatgatgataagctgaaaagctacacttcccgtgatggaagaactcctgtttacttcggtcttacctcttcctgcccgttccatgtggaaaatattgaacgtaaaggattaaaaggaacatacgctgagtttgttactccaacatcccgtttccatgcacatatctcaattccgggagatcatatgatctataacgctttagccggagttgctgtcggatatgcgcttggcatgaataatgatgagattgcacgcggaattgaaaagctcgttcctattgccggacgtaataacctgattgaagcaaagcattacacgatcattgatgactgctacaatgccaatccggcatctatgaagtcctctcttgacgtacttgcatatgcagatacaagaaaggtcgctattcttggcgatatgggggaacttggtgcagatgagcttgcgatgcaccgcgaagtcggagcatatgcagcatttaaaaacactgatgttttggtctgcatcggagcactttccaaagatatggcagaagctgcaaaggaaactgttcttgcaacagagaagaacatgaaagttttccattttgacacaaaagaagacttttaccagaacatgggacagattctcaatgaaaatgatacgattctggtcaaagcttcccactttatggaattccctgagattgtgaagaaactgtcagaggaagcataagctgaaaccacactaaaaatataagtcagtcttaaaaaagagttgaaacttctgcctggatcattctagctgattcaggcaaatggtttcaactctttttcagattctattatcttattctacttttcactctatcccgagtgcttttcctaccatctggaactctccttcataaatgcagttcggcagggtaccatccacaatacccttcctgcattcttcgaaatccatccagatcacttcttccacttcagattcctgtaatttcaaatttttaatgtccactggttctctataaagatatacggtactgcgttcattgtcacggaatggttttccatgaaattcagcttcaaactgtcctctgtgtgttccgataaactgaagctgatcttctcttgcatgaattccaagttcttctttcatctcacgcaatgcactttccatcagttcatccccggcactgacatgccctgcggaagaaatgtcatacgctcccgggttcgaatctttacattcacttcgtttctgaaggagtacatcataaccactctcctgattcggacgtacaatccagatgtgtaccgttgaatgcaatgttccatctctatgtgcaacaccgcgttctttcacctgtccggttttatttccatcttcatcaatcacatcaaaaagttccatcgactttccgttgagtgccacatactcaagcacatcagatttattatacacaagctttaaagagaaaaattcctcttcttcgtccatcagacggaagaaaatcttgtctccctcccatagattcaggtcttttatcttttctttctccacccattcaagaatcccctcgtcacattcgatcggatcacctgtaaatccgtctgctgtatacagtgacatatattccactacatcttctccatatacaaatgtcacgattcctctgtatttccaggaagtcaatgtataaccggtctcctccttcacttcacgcagaaggcattcctccggactctctgcatattcaaaatgtccgccaacgccgatccatttatctttattcacatcatttttcttcactactctgtgaagcattaaatattttccatctttttcaatataacataatgtgctttgtctgttcatcgtacccctcttttcttttcactatctctatgtctaatgcaggtacacaatcgcttaacctgcagattttatccgcttgaacccaacaactatgagaaacacgctctgcgagtttctcaagttatcgcggcagtcgccaaggtctcgtgcaagcacggactttggctcgttgctcgcgtaaattatagtatgttactgttcacacggtgtgcgaccagtaactacagtataacatatttctttatgagctgaaccttaacttgtaaactgtacgcaactaaattataatgatgttatctatggaaacgatgcgtttctgattgcacgcatgtgaaccgcagcaacaattcaatgggggatattatttatgtggtcaagaaaagagctcaagaaaaaggcgcgtattttaataaaatcaaactattggcgaagtatatctgtctgctttctgattgcgatgcttacggcttcgtatccgatttcccgctctttatttttgaactattttcctgataagattcagacgaaagcagagcttattttacctgcttttatttctgctgaaagcctcagcagtgcatttttggactttattcctgataatttcgtagttgcatcctttttacatacgattcagaattccctgaagcgtccggactttattgtcacttcgtttctcacacttggagtcattttttcgcttttatataagttttttatcagcaatcttttgattgtcggtgagaaacgtttttttgttgaatcttataactatgaggatacgaatatttctaaaatattctttttatataagttgcgttaccttgcaaatccttcctgggtgatgttctgctacacgctttttcagaaactttgggatttaacaattatcggtggaattattaagcattatgaatatagcatgattccatatatcctcgcagagaatccaaaaatcagtcaaaagaatgccttttttctctctaaacagcttacaaagggaaataaatggaagctctttttgttagattgttctttcctcggctgggagcttttatctctctttacacttggaattctggacatcctttatgtccgcccgtacaaaatgaactgtaaagcatccttatatctgtttttacgaagaaactatgtgctttcaagagcgcctaaatatgagcagctcaatgattcttatcttgagcatgttccttctgaagatgaacttctgattagtaaagcactttatgacgattctgaaggtccttacacaaagatctcttattttgcaccgcatcagtatccggtatttcttttttctgtgcaaccacctattgccgcagtaaaatcaccggtcaatccggcgcaaaattatgactttctgtcctgtgtatttttattccatgccttttctattttcggatggcttttggaaatcatttccgaactgctcagttgcggcacactggaaaatgtaactcttcgtacgcttccatggctcccgttgtacggaatctgtggtctgcttatactgttgctgttaaagaaatatatcaaaaagccggctagtatgtttattatcaactttattgtgtatacagttcttgattatctcatccagctgtttcttgatcttggctttggaattgagcttccgaaatatcattcttatcttgctttcatgaatggagaagcatatcttggtgatggggcagtatttgcacttcttggctgtgcatttttctattactttgctccgcgctggaacagtctcttcatgaaattaaagaaatggatgagaattttgatctgtatccttctgacaacagtttttatatttgatctgctgtccggcataatccaatattgattttactgatgaaaaatagtaaaatcttaattatcagtaaggttggttttgctgtttcgattttttctaatacagtatgaacctgttccccctgacaaactattacagcttagaagaaagggaaatattatgaaaaaaagagtcgttgttgcactgggacaccgtgcacttggaactacacttccagaacagaaagtagccgttaaaagcactgccaaatgtatcgctgatctgattgaagcaggctatcaggttgctatcacacacagtaatgctccgcaggttggtatgatccacactgcattgaatgaatttgcaaagaaccatccggaatatacagcatccccaatgtctgtatgtactgccatgagccagggatatatcggatatgaccttcagaacggaatccgtgaagagcttctcaaccgcggtatctaccgtacagtcagcacagtcctcactcaggtgatcgtagatccttatgatgatgctttctatacaccaacaaaggttctcggccgttatatgaacgctgaggaagcgaatgaagaacgtaagaaaggcaacttcgtagtggaagaacctggtaaaggtttccgccgtgctgtctctgctccgaatccggtcaagattgttgaacttgatgcagtgaaagctcttcttgatgcagatcagattgttatcgcagcaggtggcggcggtattccggtacttgagcaggataatcatttacgtggcgcaagtgctgttatcgaaaaagacctcgcagctggaaagcttgcagaaggaattaatgctgatcttcttattattcttacaaatgttgagaaagtatgtatcaaccttggcaaaccgaatgaggaaccactggatacaattactgttgatcaggcaaaaacttacatggaagagggacattttggaatttacaacatgcttccaaaattccgtgcagcagttgaattcgtagaaggacacgaaggccgcaaagcttacattacttcctttgataaagtctctgatgctctgaatggtaagaccggaacagtaatcgaatagattgacagattgaacttattagaaacataacctggaacaggccgtgatttcacattttaattttgtgaaatcacggcctgttttttactttccatcacagatttctttcatcctgtttttttgtggaataagatacttttaatttcaaaatatctcttgctttttcataaatatgtgctatagtatatatatctcttggatgtagtatcgaaaactacatgttattatatagatgtatcggaggtagattttatggaaaaaagactttatatcaaagaacctggaagcgcaattacacattttattggaatgatcatggcaattatcgctgcaataccacttctatacagagcagctcgtgaaccgagcaaactttatattgtatcgcttacaatttacgcagccagccttatcttgctttatgcggcaagtaccacttatcacacatttgatatttccgagaaagtgaatacggttttaaagaagatcgatcacatgatgatctccgttctgatcgccggaagctacacacctgtctgcctgctggtaatcggcggacgcaaaggtatcacactgctatgtattgtatgggcattcgcgattgtcggcatccttatcaaagccttctgggtattctgtccgaaatgggtatcttccgttttatacattggcatgggatggacttgcgtgcttgcattttctacaatccttgataatctgtcagctgctgctttcggatggcttttagccggtggtatcatctatactgttggcggtgtcatctacgcactgaagctcccgattttcaacagcaagcataagaatttcggaagccatgaaatctttcatctgttcgtaatgggcggaagcatctgtcactttatagtaatgtatacattccttctaccataaatataatttattgaaacgaaaagaagaaggctatcaactacgatttatactgttatcgtagttgatagccttcctttttcatttcgttactatttacatttcatgcgacctgcaacgtatctcactatctcgcatcataccttatcctacattgaaaactggctctcatacagataatgatagaaaccttccttcttcatcagtacttcatgattcccctgttcaatgatttttccatctttcattacgagaatcacatcagcctcacggatggttgacagacggtgtgcaacaatgaaagttgttcttccttccatcagttttgcaaatgcctgctgaatcttgatctccgttcttgtatcgatggatgatgttgcttcatccagaatcaacatcggtggtctgcataacataactcttgcaatacaaagcagctgcttctgtccctgtgaaagcccgccaccatcttctgtgatccatgtatcatatccttttggcagacgacggatataattatggatatgagaagctttcgctgcctcgacaatctcttcttccgttgcatccggtcttcccatagcaatattttcacggattgtacccgtttttaaccaggtctcctgaagcaccattccgtaccctgcacgcagactttttcttgtcatttcgcgaatatttatatcttctactttaatacttcctgcattcacatcatagaaacgcatcagcagattgatcaaggttgtctttccacatccggtcggtccgacaatcgcaatacgctgtcctggctttacttccagattaaaatcttcaatcagatgctgacctggcagataagagaatgaaacatcctctactttcacatttccatcaatatccgtcagatgaactgcatgttccggttccggtatctgcggttcttcatcaatcaatgtaaatactctctgcgcacatgcaatcgcattctgaaattctgtcacaactccggaaatctcattaaatggctttgtgtactgatttgcatagctcaagaaactggacaattgtcctacgctcattgcaccgcgtacaactgcaaatgctccggtaattccaactcctgtgtaaaccagactgttaacaaatcgtgtcgccgggttcgtgatggatgagaaaaatgttgcccgcaaggatgcctcctgcaatcttttattcacttcgtcgaaacgctctgttgcatcttctccgcgcccaaatgcctgaaccactttctggtttccgatcatttcatcaatcaatcctgtctgctctccacgtatttcagattgcaggcggaacatacgaaatgttctctttgcaataaaatttgctacaaagaatgataccggtgtgataagaaccacaacaaatgtaatcgatacatttacggataacataaaacaaaatgttccgataatcgttgcaataccggtaaaaagctgtgtaaatcccatcagtagtccatctgaaaactggtcaacatccgcaattacacggcttacaacttcaccatacggatgtccatcaatatatttcaacggtagctgctctattttatcaaatgcttcatttctgatatcctgaaccatctgataggtcatcttgttattacacacattcatcagccactgtgccaatgccgtgatcagtgtgcacacaccaatctgaatcatcacctgaattactcccggaaaattcactttgccttttccgatcacataatcaactgcatgtcctgtcagctttggaatatataatgtaagcgcaacggacacagtcgcaagcagaattgaaaatacgagaaaaattctgtatcttccaagtcggcagattacttctttcaatgttgctgcctgacttttctgttttttctcactatttgtctttcttttatcagccattgattaccgcctcctttggaaattgtgaataatagatttcctgatagattggacaatccttcaacagttcttcatgtgttccgattcccgccattgctccatcatccaacacaatgatctggtctgcatgctgaatagatgctgctctctgagatacgataaatacggtcggctggtttttcatctctttgatcgacttgcgaagtgccgcatctgtagcaaaatccaacgctgatgcactgtcatcaagaatcaggatctccggtttccgaaccagtgcgcgcgcaatcgtcattctctgtttctgacctccggaaagatttcttcccccctgttcaatctgaaattctaatccaccttgtttcgtatcaacaaattctcttgcctgagaaatgtccaatgcttcatacatttcctgctctgttgcatcttcctttccccagcggagattgtccgcaatactccctttgaaaagcactgctttctgaagaacgacaccgatatgttctcttaggttctctgtctgatattctttgatatcacgtccattgatcttcactgtaccgtctgttgcatcataaaatctcggaatcagattcacaagagacgattttcctgaacctgttcccccgatgattcctatcgtctgtcctttcttggcgcagaaatttatatcagataaggatgtatctgaagctcctttataggtcaaagatacatgagagaattctacgaccggaattttatttttcaaatcccaatctgtttcggaagaattgctcttccatcttacatctccctcattcatatctggtttcacagcaagcacactctccacacggttcagacatgctgctgccttcgtcacggaaatgatcaagttcgctaacttcacaagttcaacaagaatctgtgacatataattaataagtgccacaacctgtccctgggtcagatctccgatatcaacacggactgcaccgacatagatcaatgctatgattgctccgtttacaataatatatgtcagcggattcatcattccggaaatgcgtcccacatatttctgcgcatctgtaagaatttgattcgcattttcaaaccgcttcgtctcatcctcttctttattgaatgcacggataactcttgctcctgtcagattttccctcgttgcaagaagtacctgatctagatctgcctgcactttcttatacatcggcatcgtcacaagcatgattccaaacacaataagtgaaagaagcggaatcgtcacaacaaatacaagtgctgctttcacatctactgtaaatgccataatcattgcaccaaatacaatgaacggcgaacgcaggaacaatcgtaaaacaagattcacacctgactggatctgattgatatcacttgtcattcgtgtgatcaatgtagatgttcctaattggtccatttccgtaaatgtaaatttctggatatgttcaaataatccatgtcttattcccgttccgactcctgttgctgccttcgctgcaaaatactgtgctgtaatggaacagacaagtccgatgattcccagcgcgatcagtacaaaacacattttcacaatatatggcttatcctgatttgcaattcccacatcaataattgccgccattaccaacggaacaaacaactcaaaagatgcttccagcatcttgaacaacggagcaagtatggattcttttttataatctttcagatatgcaagtaatgtcttcataatgtgctctttcctttctcttattttaattaaagagagcctgtcaaaatgacagactctcttatatcattattatagactatctatccaatccgattctctctacctgtcttccgatacgcattgcttttgcatatgccatgagacgttcttcattcttcttatcgtactttctgtagttctcaataacaagttcaaagatatctttatcaatgtcttcacggaaacggatgcagtcgcacacgcttctgtcaattccatatacattgtaagaaccgtactttgtatcaaacacatgcttctcatcctcaaaagcctgctctgagaagtaatgtctgctgacttcaaaattcatcttcatcttgtgacggtcacttcttcttgttgcaattgaaagaatctccggctctttatcaatcaggcccatgtaatagcatgcactgtctgcgcagattaccgcttttctatttactcgtgccacttccactgccttataatcttccggtttggaaaactccggactaatgatccaataatgtccatgtgctaccttctcaagctttccttctgctgtcaacagaccaatctgacgatttgtaagtccttccttcatcaaatcttccgtatcaatatatcctttgtatttgtctgcaatgtatttcactttatcatagataatctgacgcataattcttttcctcgcttaactcgtgtattactagaaactgtaagaaatgtttacgggctgctgtgatcagcaacacctgtgattcttttaagtctttcgtattgtatcatctatcaaagcggttgacaataggtaagacgctgatttttcagtccgatacttctatctcttttattaaaaattcattcccacgaagcagataggtattttcacttccacagtacggacagattttcccatgttctaccgttggatattctttctggcattcttcacaaaatgttactgcttctatctgctcgattttcagttcggcttcttccataagcggttctttcttcttcgcccaattccagcaatccgtcagataatcatgtagtattcctgacacttccccaatctccagtgtcacggcagaaaccttctccacatgattttcctccacaaccttctttacatcttttacaacataaaagacaacacctaattcgtgcattttccttccctctcaatttatatttttgcaactatatcctgaagtaatctgatcagttcttttgcgttcacaggtttaaagatacactcattcattccggctgacttacactgatgtatactttcggtagacgcctgtgctgtcattgccaaaatcggaatctcggctgcatcttccctttggtctgccatagagcggatctttcgtgatgcctcttttccatccaactccggcatcatgatatccataagaacagcatcatattctcttagccccgactgtttaaatagttccgcagcttcccgtccattccatgcctttgtcacctgtgcaccagcttcttccagataaaactctgcaatctccatattgatctcattatcttcagcaagaagaatatgatatcctctgagcggtttatcctctttcagatcctgttttgttctctgcacacattcttcattctggctttccttttccggctgaactactggaaaactcaaataaaaacggaactccgttccaacgccgggcgtactgctcacccgaattgttccacccatcttttcgaccagtccttttacaattgacattcccagccccgttcctttatactgcgttcttgcatcatttatttcctgtgtaaaaggcttaaacaattcttcttttatatattctctgctcatcccgacacctgtatccgtaatacgaaattcgaatgccgcacacattccatcaaaagaaagttcttttacataagtgtctatccttcctccacgcttattatatttgattgcattactgaacagattcagcataattcttctgatctgcagcgtatctccgctcagcatcatatgattcaccttttcccgatggctctcatagcggatttccattgcctctacctgtgcactgaccacaacttctacctgatctatcaacgtattcagatcaaacgtatcattctgcaactctaaatatcctgactctattttactcatatcaagtacatcattgaccagttcactcagatgttggacagacagatccattttatcaacacactcttctatcttttcctgatccttatagttcttacggatcatctggatcattccgagaataccattgatcggtgtacggatatcatgactcatccgattcatgaattctgtcttcgcacggctctcgagatccgctttttcgtatgcaacctgcagacgttctctttctctgtcttcctgctcatggaactctgaaatatccttgaacaaaataattgcaccgatcaccgtacttgtctgcttcgtcttactttcataaaccatctcctgtgacatcaggactgtctcctgccaccagcatctgcttccatcactttgctctacctgatattccacagtcacctgcttttcgcctgctttaaaacgttcgatcagctgtgccggattttctgtgatacgataattttctctcgtctcttttgtcacgaaccgctgacaggtcttacaatacgtatcataaggacatggaagttttatgtctggaatctgcctgttttccctgttttgccaaaatatcttttctaataaattctgtgtcagattaacactttggattatttctgctgtatccatcaatgcttctatatagtttccgttttccaaaatggactgcgtcagctgttcatagaactgtgtcagttgctttttctcatttacgatcaatctgtccctgtcctgataaacatcaaacccaacaagaaaatgatgcagatttccattttcagcaaagtcaggcagtaaaagtgtgatccggccacgcaaaactctgtcaccatctttgtgacaataaaaatattcctctacctgatgttcctctgtcagtgtttcccggatttccgacagctgaagtttctcccagagttccctgcggttctcttcctccgccagctcctgtataatctgctctactgcaccagaataactaccatcatctgcaaggaaaaattctgagcttgcacgaagaacaacatactgatccacaatcgcatcacagtacagacaatctgtaaaatgaaatcctttttcttttacagattgtaacagccgactcctaattctccgcttgtcagctgcttctttcatcttcgcccgattcttgtctacatacatgttcttatccgcatatcggaacaggtctttcatattacttcccggaaaatctgtagacaatgcatatcccactgcatagctaagtagcatatccggatgattctttgaataacgctccgtctgttcccgtatcatctgcagacagtctttcacctgctcatgatccacctgctttaacactgcaataaactcgtctccaccgtctcttccgacaaaatatttctccggaagtgctgcccgcaattgttctgcaaatgatctgatatattgatcgcctctttcatgtccctgccggtcattaatgattctcagattatttaaatcaaacaccattaccgccgttgattcactgcccgtaagcggctcttcagatgccagaatctcctcgcacttattcttattcggaagtcttgttgcctcatccagataaaccttctgacgaagcacacggttttgcgccgcgtaccgcaatgccttgaaaagctcatatcccaacagacacacaattccaataatatccacgacaacaattttctccagacggtttaaggaagatgccagcttctgcgaataactttccgcaagccctgttgtctcatcacagattgtaaaaaatgtttcacttttatttataatctgtgtattctcatatccttcttcacgagccttatagatttcttcctttagttgtccaaaaaattgttccagcacttccatcttatcctgaaatgctttatcatctagacggacaaggttcagttcatcgctgccatgacgtaacccatcaatatacgcatccacttccccgatcatttcatcctgtggtctctgtgcattttccagtttgatgatctgctgcgtctttccacgcacaagtccggcataattcactacacgagccgtcccttgcatatcgctgaccaatatcataattccaaagaataatgcaatcaggatacaggtaagaagcatcatgaaaatacgcagaatccgtgtgattttcttttctttcatatctttataaccttacttttactttatttaaagattataacagaatctcctttgttttcccataataaaatacatcaccagaggctttttaaaaatggtgtaatacttgctatctgttttggaaaatgtgatactataaattatagtcacacttaattttcgtaacaaacggagggaccctctatgataaaccagacaaaacaaatattggaagaatctctgaaaaaattaatgcttcaaaagccgctcgataagataaccatccgcgatttaaccgaagactgcgacatcagccgtatggctttctactatcactttaaagatatttatgatctggtcgaatggtcctgcctggaagatgcaacccgcgctcttgccggcaaaaaaacttacgacacctggtctgaaggactggtacagatttttgatgctgtgtatgaaaataagccatttatattaaatgcttaccgctgcatcagccgggatcaaattgaaagtttcctttttcatctaacttccgatttactgatgaatgttgtagaggaaaaagcagaaggcaccagtatttctgaagaagaccggcgctttattgccgatttttataaatacagctttgtcggtcttatgctcgactggatcaaacagggaatgaaagacgattatgtcgatctggcacataagatcagtattaccatccacggaagccttacgcattcaattgaaaattttgcagcacttcctaaaaaagaaaattcataacacaaatatactaaacctatactttacaaaaagaggcaaatgataagttttttatcacttgcctctttttgtaaattgaaaacctttaaaaatgtccatactataactataacaactatacttcatatctcgttatttagagtaattatgatgagatgatctcaaaacgagacatgaatccgttttttcagaaaggtggtttattatgtcaaataagaaatctaaacttggtgtaatctctgcagtagcagcaggaacaggaactgcaatttatctcgcacagaaggcaaaaaaagaatctggtaattcagaatccgataattctatttttaagaagagtactgttgccgattcttccgttccagataactatcgtaacactgaacgcggaaaatatgaccgcaacagcaaaggcatctattattccaacggaaactacgaagcatttgcacatccggagaaaccggaaggtgtagatcagaaaaatgcttacatcgtaggaagcggacttgcctctctggcagcggcatgtttccttgtccgtgatgcacagatgcctggatgccagatccacattttagaagcaatggatattgccggtggtgcatgtgatggaatctatgatacttcccgaggttatgtaatgcgcggtggacgtgagatggaaaatcatttcgaatgtctgtgggatctcttccgcagcattccatccatcgagacacctggtgtttctgtacttgatgaatattactggctcaataaacatgacccgaactattccctttgccgtgcaactgtaaatcgtggcaaagacgcacatacagacggaaaattcaacctcagtcagaagggctgtatggaaatcatgaaactcttcatgacaaaagacgaagatctctacgataaaaccatcgaagatgtcttcgacgaagaagtatttgattctactttctggctctattggagaacaatgtttgcatttgaaaactggcacagtgctttggaaatgaaattatatttccaaagatttatccaccatattgccggactgcctgatttcagtgcattgaaatttaccaaatataatcagtatgaatccctcattcttccgatgcagagatacctcgaagatgccggtgttgacttccagttcaatacagaagtcacaaatgttgtattcaaattcgaaggagacaaaaagattgcatctgcaattgaatgtaaagtaaacggacaggaaagaggtatcgtcctgacagaaaacgacctcgtatttgtcacaaacggaagctgtacagagggaaccatttacggagatcagaaccatgcaccaaacggggatgccgaagtccgtacaagcggtgtatggaacctttggaaaaacattgcccgtcaggatccatccttcggacatccggaaaaattctgttccgacattgccaagacaaactgggaatctgcaacagttacaactctggatgacaagatcattccttatatcacagacatttgcaaacgtgaccctcgcaccggaaatgttgtaaccggcggtatcgtcagctgccaggattccagctggctgttaagctggacgatcaatcgtcagggacagttcaaagaccaggataaagataaggtatgtgtctgggtttacggattatttactgatgtgcctggtgactatatcaagaagcctatgaaagactgtaccggaaaagaaatcacagcagaatggctctatcaccttggtgttccggaagatcagatcatggatctggcagaaaacagtgcaatctgtgtaccgacaatgatgccttacatcacagcattcttcatgccacgtacaaaaggtgaccgcccggatgttatcccggatggatgtgtcaacttcgctttcctcggacagtttgctgaaactccaagagatactgttttcacaacagagtattctgtacgtactgctatggaagctgtttatggacttctcaaagtagaccgtggtgtgcctgaagtatggggaagtgtttatgatatccgcgagcttctcgacagctctgtaaaacttatggacggaaaatctccacttgagatccagctgcctggaccgctgaacgcactgaagaaaccgcttctgaagctcgtaaaaggaaatgtaattgaaaaggtactgcgtgatcacaatgtactgaaggacggaatgtgaaaagaacacttgttcttttctctgaaatatgctattctatttctacctgatcacgtaagaagaatgcctcccggcattcttcttacttaaatgatttcagacagcatataggagaagcagcaacacatggatggatatcagttcgaagaacagtgtgcgatcatactaaaaagaaaacatttttcaaaaatagaagttactaaaagttctggggatcaaggcgttgacatcatcgcctgtaaacacagaaaaaaatacgggatacagtgtaagtattacacgtatcccgttggtaacaaagcagtccaggaagcttatgccggtgcgaatttttatgactgtgacaaggtcatcgtaatgacaaacacaacattcacccgctccgcgattgaacttgctgaaaaactggatgtagaattgtggccggattgcccggtcacacctttttacagtttattgttcaagatcatgggattattaaacctgcttcttttcctttacgcaatcctgacacttttttctgcaaagtatgattttattcatttgtcggtttctcttgatacgatatcgctggtggcactcctgacagcctctgctttaggaatcttcggctggaagtatctcctttgtaatctgattaccgccggagctttcctcttccttgcattccatgttgtgctttcacctgtatctctggcaacagattatacatacacacaactgctctccttaattcctgcagttgtatacatgcttcatgccgggtggctgaaattaaagaagatgaaaaaataaaagcttattcgaaccagatttccggattcgtagacgatacactggttactcctgccttaagaagtgccattacatcttccttctcccggatcattcctccggcgatcacaggtaccggaagatctttacagatatttccgatcaccttcggcatcattcccggaagaacctctaccacatccggctttgctgccgtcacctgtgttttcacattttcataagccatagaatcaatcaaaaatacgcgcaataccgtgagcattccaagttccttcgctcgatgaataatcgtcggttttgtggaaattacaccatccgcttctgtatattttttgataaaatctgcagcaatgttcttcgatgccagcccatggatcaagtctagatgtactaccgccagttttcctgctgcttttactttagaaacaatctccggaattgtacagatatctccatataaaataaatacaacctggctttcacttttcagacaggcatctactccttcatcatcttttaccgctgcaatcacaggggatatctccaacgcatccagaaatttataattcatttcaattctcctttgttccgccaagatcaaatgaatgccagacacagaaactgtgaacaacagtacttgtatctggcatctgtttcataaattatactatatctccttcacaatcgtctagtgtactgcatccacatttccggcagctacgatatttacacctgtacctgccacattttccaacacaatatctccaatgtgaaccggagctttgatcgttacgccgcgaagtgctgcgatacagtcaaaaatcttatctttgggaatgtcatgctctgtcttcacattgatcattggtacttttccgtctgcgacacgaactgtagtcgttacaatacgtgttggatcagttacttcctttcttgcatacgcctctccacgtggacacgtatttcctgtaacggatacaacttttccgtcttccatttttacaacgatcggacatcccatcgggcatccgatgcagattaattctctctcactcattttcttatgcctcctcgatccgaatcgtaatcttctttgtctccgggtattcttccagtttctttttcttcaggattacctgctccatctcacccggtgccatcacctgacgtttcttcttagcaatcagctgatcgtcaaaatatagtgcaatcgccttattcttatatacatctccgacacggaaacgaactgtcagattttcttccatttcagaaggtcttacaaaggatggtactgtgtagcgcactccgccttccggagaaatcggaagcatttctgcctgcaccttcttttctcctgcctttatataagcggctgcattctttccggctgccgcggcctcctgagatacaaaatccacaagatcatgcacatgcaatacatttccacatgcgaagatgccgtccacacttgtttctaatgaatcgtttacgaccggacctgaagtaacctgtgaaagttctactcctgcgctttttgaaagctcattttctggaaggagtccacaggaaagaagcaacgtatcacaagtatatctttcctctgttcctggaatcggcttgcggtccggtccaacttctgcgatcgtaacagcttctacacgatgctttccttctatatcgatcactgtatgactcagcttcagcggaatctcaaagtcatccagacactgtacaatatttctcttcaatccaccagaataaggcatcagctctgcaaccactttaaccttcgccccttcaagtgtcatacgtcttgccataatcagaccgatatcaccggatccaaggatcacaacttcttttcccggcataagcccttccatatttacaagatgctgtgccgttccggcagaataaattccggccggacgatatcctggaatgtttaaagctcctctggaacgctctctgcatcccatcgccaggataattgcatttgcgtgaagaagcagaatcccgtcctcgcggtttgtggcggttactaccttttccggagaaatgtccatgaccattgtatttaatttatattcaatactacgttcttctacctgctcaataaaacgtgctgcatactcaggtcctgtcaattcttctttaaatgtatgcagaccgaatccattatgaatacactgctgcaaaatgcctccgagacttttatctctttccaaaatcaaaatgttgtcaattccattatcttttgctgcgactgctgccgcaagtcctgcaggacctccaccaattatgattaaatcatatgttttcattttactcatcctccagttctttattttcacctacaataaattctgatccaacgccgttttttccaatctgatcaacccgcattgggacttctctttccagaatctccataaccttcggggaacagaatcctgattggcaacgccccatgccggctcttgtccggcgcttcactccatccagagagtgtgcaccaagcggacggtgaattgcatccaggatttctccttctgtgatcatctcacagcggcagataatatttccataagccgggttttctttgatcagctgatttctctcttccagagaaagcgtatccggatctaatattccatgtctcaccggattaaaatcagacttttcttctgcattcaaaagttctcttacaagttctgcaaccgtaacaccgattgccggtgcagaagaaagtcccggagattcaatgcctgctgcattgatcagtccttttacatccgctgattcaccaattacaaagtcatctccatcctcgtgtgcacgaagacctgcaaaggaagtaatcacctgacgaagcggaacattcttaacgctatgagagcaaactcttgcgatctgatccagaccatccattgtcgtgtttacagcacctttatcttctacatttactgctgtaggacctacaagcagattgccgtgaactgtcggtgtgaccagtactccctttcccattttcgacggaagctggaagattgtactcttcacataatctccaactgtcttatccaaaagcatgtattcccctttacgggctgtgatatgaagctttctgtctgaaagctgattattgatctcatcagcataaactcctgctgcattaataataagttttgtctcgattgtctcatcaacacaagtatctgcgtgatgaacctgaactctaaatccttctcctgtcttttccagtttttcaactttcgtattcaggaaaaactgaacaccgttttcgtatgcattttccgcatatcccattgtcatatggaacggacagacaattcctccggtaggcgcccacaacgcacatgtcacatcatctgccaggttcggctctttctcgatcagcgcctctctgtctaaaatctgaagtccaggaaccccatttttcttacctctctccattaaaacctgaagtccttccggatcctgctctttcgtacatacaaccaaagaaccattcctcttaaacggaatgtcaagctcttctgctattgtgtccatcatcgcatttcccatcacatttaactttgccttcatcgttcccggaactgcatcaaatcccgcatggatgatcgcactgtttgccttggatgtctcattacagacatcctcttccttttcaatcacacacgtattcaacttatatctggaaacctctctggcaatcgcgctgcctgtcactcctgcaccaataataacaacatcaaacatatccattcctctcctttatcacacaaaaaagcaaggcaaataaaacgactgcctgtcgtttcatctaccttgctcaaatctctggtatctaatattcgttttttctttattctagcacatttttcagaagaatcaatcccaaatgtactcagatacttttattttttacaacctgaaattcttccttgatctgcgccagaagttctggcttcaccagcacagcacaaatgcaaaacttaaattatatttccgccaactgattcccatcctctattattttaatctgctctgcagtgttcagaacattcagctgatattctgcaatttcctgtagaattttaaaccgttcttcttttttctttccttctttaatcatctgcgcattatgagattccaaattggaaagcactgtcaattcattgatagttgcaaaatctctaacattgttcttttttgctaactcaggattagcttctctccacgctcttgctgtaaatccaaataatgccacatttaatatatccgcttcttctgcatatgccagccattgtaggttctccctataattcatctgtggaatcaaatatttttttactgcatccgtctgaatcaaataattatttttagtcaaaaagcgcttcgcattccactcacttttctctaaatttttttcttcttccttcaaccgctggaattctttaattaaatacaatttaaaaaccggactgatcgcagatgcaaattcaaaggcaatgtctttatgtgcatacgtaccgccatattttccacgctttacatataatcctatagcattcgttttattaatccattccgcaacgcttaatacaaatgtatgtaaacctgcttcggatttaaagtggtcgaattcgaccactttaaaatcaggattataaatcatttcccacgttcctaaaaattctaatgtatttctatttcgtagccagtttttcacaacatcagcgctacgtgattctcctgttttagcttttgcaatatccgtaatacaaatataatcatccagttcttgttgtgaaattaaaattggtacatcttgtacattaattattctattcttcatccacttcttccttttctgcaaaattttccatttttatcctatatgctaataatctaaaaacataatctggcatttttcttgttcctctttcccattctgttacggttctgtaaggaattccgaaatactcacagaattcttttctattcattccagtattttcgcgtaattcttttattttatctctcatttccatatttattccgcctccgtatatacacattgtgtatatatcttaacacattttcctataaatacaatattttaatctgacaaactatttttcaggcacaaccgtcccaaagatgtcaagtcattgccacaaaaaatatgcggcttttttgccacaaaaatggcttaaaaccgcatatttctgtatagaggacgttatataattgtcacaaagtaggtttctttctgtacaatgtgaaaatatttagttcacatgtgatggataaatctctgtaatggtcggtgccatccacgtttccagggcgtccatatcaggcgtatagatacgcataaacagatggaaacctccagcgcccacaggaagccagtttatggtgttctgtggggcatcttcagacagaataacatcaacggaaccatcatcatttgcctgtaaaccggaacggtcatttatgcagtaacgatcaataggattatcgatcaggaaatcatcgtccccatatgcagtcacagaccagaatcccccttcaagaacctgcggatagctttcgaaatgaagaatatatgatttttctcctgtgagagtatttccatccgcatcctgctctatctttggatacagcgcaacttcaactgtattagcaccaagccctgcaagagctaccagtgcacgataagcgtattctgtattgaaatctccgatcggttcaccaaaataatcccactgaccaagcttttttgagaatttctggccctctttgataagctttagctgaatttctgtcagcattgtcttccagttttctgcaacatcaccggtaagaacagaaatgtcaaattccataccaggacctatattcacagctgctattttttcaagcatttccttatctgcagctgtcggagaattctttaccatcaactcattggccttattaaaaaatgtgatcggatccatggaaaggaccttatcaacaggaatataatcattctcttcgctgtagcttcccctcggaggttcataagtgtctccggatatataatcggaaagcggcataagtttcatttttccttggatggcatacacatttggaagatcctcttctcctgataaaacgattctggtaatggaccatgccatagatgtaggaacatctatacgggtaactccctcaggcagtttcccttcccacgtagaaagagtaattgcatatgcaccagccttatcaagaaccgcagcagtatttgtccatccatccagtacctgaaccttacaaaaacgatctgtttttggaagttcatagaccatcggctcctcgctcagatcataccagacctgtgaatagatcgtatccacattaggagtcaccacagtcctgaattgtgcatctgccagtgcaacactgtgtataaactgatttacaggtgcttttttggtaacaacttcctctgtgttcgttgccgaggtctcagtcgcatccatgagcaccagcggaaatgcataaacataagcatcttccactgtctcccatatattttcatctgtctcgctttcaacagatgctgcaaatcttttcatattcatatcctcctgcttccgccccaaaactttatggttcaataatattaaaatatttatactctgacgtaacagtaaccgcatccatcaatcgtgtcaggcaggtctcatcaccctcctgttcgatcaaagcagcaacattctctgcgtttttctgaacagcatctgtatcatcgaaatattctaccagcttttgggcataatccgatggtgtaagttcagcaagatggacaggattagcgtcataccagcccatatttggtcgcattctcaaactccgcagtatcttcaaaatccagcaatgcataaacttcctgatttgcatcaatcgtatactggggagccggtttgctttccgctgttaattccgatactgaaattgcggttgaactgccacagccagtcatggtaaatgccaatgcagcgacaatcaaagtaattacttttttcttttcatgatgtcatgccccctttgttctgttctttttcaaacctgaattagcttttgtttttattttaacacaagcacacttaaacaacaatatctttgtgaatttaaaattagtaaatacgcgcaaattttagatatttttcaatgtattaatttaagctcaaaataattatctattatcaagagcttaaagttaattttgaaaagttttattgtattttgaagaaatttgtgaatattacaaaaggtattcttcttcgaaaatcacagattgtaaatatttcagatgaatacatttaactttcacataccagggatgctttgaacaatacacaacctcccataccccaactccccattcggccacctctcatacccgggaatctgtctcgcccctctccgcaaatatgctttcactttctctccatacagatacggatcatttcctttcacaatcccccactccatcaaaagtgcagcgcttcctgtaacaaatggcgttgcaaatgaagttcctgtgaactctgcatatcctccacctgctaccggagccattaccctcacacccggagcagccagatcaggtttgtttgcattttccccctcatatatctgtgccggtcctcgtccggagaagtctgcataagaaaaggtcaatgcattatacgctgccacagtaataacaagagatgcagtagaaggtatcgtaagtgttgtggaactgtctggctttaaaaatgcagtaccgatattaagtgcattctgtaccggaagccacatttgccacaacttatccacaacctgtcctggcatcatctgtattttccacactccggctgtgacaaattcatttcgtggttgaaaactaatataaatttcctgacgaatactatatggttttggctctccatagtaaaccaggagttctgtttcaccaatctgtattctttgtgttccttctttttcttccagtctgccggaatgatttccggatggatcgacaattgtaattgcgacttcatcgacataggatttccaaatttgcagactgaatgacttctccctctgctgtactgcaagttgaacttctgtcatcattccttttctatattcacctgccgcatgtcccgcagtcgttccttcatttccacttcctacacaaatcacattcttccaacgttcagatactgtattcaaatatctttccaaaagacttgttccatcatgggaaccatatgtattcccaaaactgatattgatcgccaccggcttttttaactcttccgcttttcgtacgatataatccacacctcgcatcagctgggtagttcttgggaatcctgtttcccctgctccccccatctttacaatcagcagccctgcttcgggtgcagctccccgatattttccattcttactacctcttccatttccagccgcaatcccggctactgctgttccatgtccactggtatcacgacttggtactatgcgatacctttcttccctgacttccatgcgtagtgcttcatttatctgttctgaagtgaactctgttccgatatgatattcttgcggcggtttaccgttttgtaacgtctgatcccataaagcaagaattcttgtcgttccatctgcatttctaaaatcgggattttcataatcaatcccactgtctacaattccgatcaatacgtcctttcccagcagtggaaatgactgttttttctgctgattatcctctaacccctcttgcccaatcgaagaaaaaaaaggcgcagcctgtacttcatcaatacaggacacacgccttccattctctatttgaaaatataaacttttcggtttttctataaattctacttctggaaatgctgccagttcttttatctgactttcttttatttggataatggcatatccacctgtcagttccgtcacataaacagctcgtgttcttactcgctctaacgtcccggaatacttcacgatcaattcccattctttttcttccagatcatatccgatatccagactctcgcttttctgacgttcttcttctgtgatacttaatgcaagattcaattggttttctattttctggctcacgaaggctgcaccttacttcatctcttatttctatgttttatgaagtaatttcgcagattattccattttcatctctaagacaaccacctcacagcttttcagattcagcctgttctttgtataatctactgtctcgttcttctggttcgacattaatactcttttcacattccccttcaattcaatgcttgctgcatctgttccgaaattagccacaacaagaatacttgtcgctgcgtctgttctataaaatgccaggatatcatccatttcttcatattccggaatgaattctccataagtaaatacatttttaaattcatctgatttgcgcagtgctactaactttcgataataattcagaacagaatccggattgttttcctgatcttcgacattgatctctttgtaatcaggatttatctttaaccatgccgttccttttgtaaacccggcattctccccgcttgtccattgcattggtgttctcgcattgtcacggctcatccgattacaagcttccattgcttcccggtcagataatccagcttcacgggcaatctgatactggtcttttgtactgatatcatcgaattcgtcaatgctgttccacttcgcatttttcatgcctatttcctgtccctgataaatgaaaggaattcctctgagaagaagattaaccgtaccaagcatcttcgttcccgccggtgtctgggcataagccggaagaaatcttgacacacctctcggttcgtcatgattctctataatatttgctttaaatccatacttctgtgtttccatctgagactggaagattgcttttctccatttagaaaattccatcttcggagcatcataccatccatgttctccatcactgagacaatgtgcagtaaagtcaaatattgttgagaaatgtccgttttctccaataaattccggtaattcatccgctttcatattgaagacctctcccactgtaaatgcatcgtatttttggaatgtatttttctttaagtcttccagaagttctccaacaccatctacactttcaaccattttccagcagccggccatgccatctgccccatccggttcaaaatcaggaaatttcagatctttcttgatattaatgatcgcatcgattcgaaaaccggaaagtcccttttccagccaccagttaatcatatcatagagtttctgtcttaatttcggattctcccagttcagatccggctgttcctttgcgaacatatgaaaataatatttatcagttcccggcaccggttcccagcagcttccgccaaaataagaacgataattactcggtggatttccattctttccttctcggaaatagaagtaatccgcatattctccttccggatccgctaatgctttctgaaaccattcatgtttgtcagaacaatgattaattaccagatccatgatgatatgcatgtctcgctttttcgcttccgccagcaattcatcaaattcttccatcgttccaaattcttctgcgattgcataataatctgcaatgtcatagccctgatctacaaatggtgatttatagattggtgataaccatataatatcaattccaagcttttttaaataatccagtttcgatatgatacctctcaaatctccgattccatctccatttgtatcaagaaaactcttcggatatatctgatatgctaccttgtcatgccaccactttttttccatattatcaacctctttcacatcattttatctttcacataatatagcgtcacgatctcataagctttcgtattgccagatcccatcgcctgtattatactgctattatatgattatatttgcatgaattcttgcattattttttcattgtataacataatactgctattttaggagggaactcgtatgaacgttccacattcactcatattagagcaaaaagaaaatacaaaacatggagaagtattctttccgatccaaaaatatattacaaaacttaacttaaattccccggtcattatgactcactggcacgaagaagcggaactcactttgataacaaaaggttcctgtatttatcaaattgatttagttgactatgaagtaaatgaaggtgatctgttattcattccaccactgcttttacattcaatccgcctgaatggaactgatgatttctgctcagaaacctatgtgtttcatgttaactttttagggggaaatgcaacagatatatgctccacccgttatcttacacctatgataaatcatgaattgaccttgccttatcatatttcatccacacaccctgcacatcattctcttcatgaatgctttataaaaatggcttcactctatacggaacaaacatttggatatgaaattgccctaaaatcagtcctattgcagacactgtttctcctacttcaatatagcaccacagagtctgcaactatttctgcttcttcagataagctgaaaaatgtactcgattatatcgatctccactatgccgagcctctcacaatttccgaactcgcagagctttgctatttcagtgaatatcattttatgcgttttttcaaaaagcatatgaacatgacctgcatccaatatattaataatgtccggctcgaaaaagcagtggaattatttgaacatggagaaacttccatcctggaagtctcactctccgttggctttcataatctttcttattttcacagagcctttaaagccaaatatcacatgacaccattatcttttatcaaaagactgaattaatgttttgctttaagaaaagcagcggccgaaacttccattttcagccgctgcttctataaattcaatcttctattttttctttcttcgtctcttcttgattaactttcgaatcaatactaccaacagaataatgatcagaataagaaccagaacgataccaacgatcatcactgaaaacttattcggattcttcacgagatcgatcacatttctgctttcatctacaactttacgtccatgtgtcgtctcataatactccggcacatttgaaatgccgttgccatctgtatcatcaaaagacttcatatatcttgcgatcgcatcccatgctttcagctccttatcgccttccatgattgcctgatcttccagattctcgatcggattaccatccttatccttcggctcgatcttcaacagaccataagacatttccattacagagccaagcatctgtcctgtataaagatccgtcacaactcggtataactggtcatcctggatctcgattcgctctccatcttctcttgtcagataacagtctgttactttattcaagatcattcgatgcggattgaatgtgaaattcagcccgctgcaatataatcttgcagttgtcataaaatcggaaaccgaagcgtctacttctgctgccagtttcaattctttaccagtcagataaacatcaatcagcggatatcctgccagtccgtcttttcctattccaagtgaaaatgaattatatacatcttctacagtgatatttcctttcgtatatgtgtcgcgcacacagccgcttggaacaacagctacatccaccggcgttccattatagtcttctgaatgctctacagaatagatatacgaatcagacataatatctccaagattcagttcttcatgcttcgtctccatttcttcgagactgttgaattcgacatcattctcggcaagaacttcatctcttgtatatccgaaattcgtcagataattagtatctactgtatccatcagcgcatcgatccgctcttgtgtcgcctgatccggctcaatatcttcagataccggaatcaactcgtaggaagtcatctcccaacgaccatcctgtttctgtgtcatggaaagtgatccaagatttcttgcgtattctccacaggatacaatgtaagtatttccgtgctgaataggctcttttaactcggtatgtgtatgtccgctgatgatcagatcaagatccggtacttcctttgcaaggatctcatcttctgattttttctcgtcctcccaggttccgctgtgagacacacaggcaatcatatctaccttttcattcttcttaatctcttctaccgttttcttaactgactcaaccggatctttaaataataattcacaggttggtgcacatttcagggcatctactccaaacacgcccactacggcgatttttacatcacctttctgaacaaccacataatcctttacgccatagttttcaaatgctgactgaatctgtttctgaccttcactcaatccgttcttttccatgctgtcccaatcaacattacacacgacaagactcggtaccgtctcgccggaattcttcgccgctgtcagcatgtctgccagtcccttggagcgataatcatattcatgatttcccaaagttgacacatcacatccgagatatcccagcatccgaagttccgctgcttcggtatcataaactgtctggatcagcgttcccattgaaaaatcaccgccgtccagtatcagtgtatccggattctctttcttcttctcgtcaatcagagtctttagcttcgcaaatccaccgacttctttctgttctccatctacaattgttgaaaagctgtttaaatgagagtgtgtatcatgcgtaaacaaaacatctaactgtttgcttttttctgccgcttctgccggaatattcattacaaatggaagaagcattgtaatgatcagaaagagcgccagaatcttttttcctcttttcataagttcttttctcctctcaaaactcgtggtcactgggctgaaagccccgaaactacggtatttatttcagcgactacatatagtcgctgtagttacttatattctgtcagttcctcataatcaagatcttcaaaattaattgcaataatctgctcttcgtccacgccatgctgttttagataatcctgataaatctccaatagtattgattttccacatcgtctcacctatgataatgtaaaaagcaataatattcaatagtttttgcatcgcaatgtaaaaactatatgaattttattgttttttgcattctattaacttttatagattctattattagttctaaaattttataattttattactagactaaggcaaatcgattttattttctcttaattgcattccttttcattcagtgttagaatttatattattgctctaaaatttttactgcaaaaataaacagggataagaggataaagatactatgtttcagatttttgttgactcggcagccaatctgccggctgtaactgcaaaacaatacgatattcacgtgatttctttcgtcaatcttgttgacggcaaagagattacctgttttgacccggatctttcaccagaggaagaacgtcagaaaggaaccgaatattatcaggccatgagcaggggctgcgaaatcaaaaccggactgatcagcactgctgcctttgaggaagcatttcgaagcgcactcgaagcagaccaggatgtgttatatttctcactgagtaaaaatatcagtggtacttacaattctgcaagattagcttcggaagagctgttagatgaattcggagataagcacaagattcgtctggtcgactctctcaatgcctcacttgcccagggaatccttgccgtctatgcaagcgagatgcgtaccaaaggaatgtctgtggatgaggtcgctgatactctggaatgttatgttgaaaaaatgaacggagtcttcactgtcggggatttaaaatatctttctcgcaccggaagaatcaaaggaagcgttgccaccatcggaaatgttcttaagatcaaaccaatcttacgtggaaacaaagatggctatatcgctttttacaagaactgtcgcggacgtaaatccgcactgaacgaactggtcaatctggtctgtgacaacattgtagagccagaaaagcagattctcgggatcgcacacgcagatgcatatgaagattcgctttacatcatggacaagatccaacagaaaatcaaagtgcgtgattttataaatacttcttatgatttctgtaccggaagccatgtcggaccggatacgattgcacttttctttattgggaaggacagggaactttcataatatatagataataaaagaggaacaagcccattggcaatacacatgccacctgctgttcctcttcatttataaatctgcccgttttttcaaaaacttctgaaatgcctcattgcctaaaatccaatgtgcaaatcaagaaaaccaggaagaaaatatccctgtgggtgcttgcataccggacacaatgcaggtgcttcttttccttcgtggatgtgaccgcaatttgtacagatccatttttgggttccatccgtattttcgcacatataaaacgtgttattctccaggctgtctgcaatcttacggaatctttggctatgtgctgcttctatctctgcaatctgctgaaatgttgctgctacctcaaagaatccttcctgtttcgctacatctgcaaatgccggatacacatcctccgcctcttcctgctcattatgttctgacgcacgcaacagctgaaccagagtcttcgtctcatctaccggataacttccatcaataaagatattcgttcctgatgcttcttttaacaattcatagtaacttcccgcatgtgcccgctcctggtctgctgtgtataggaaaatgtctgcaattgcaggttttccttctttccgtgcctgctccgccgcaaatgtataacggtttcgcgcctgtccctctcctgcgaacgcacgcatcagattttgttttgtcttgctttctgaaaataaaacagccatgtcatatacttcctttcttcaaatcttctactcttttctaaaagctaaattcatccaaatcagtatatgccatgactggtttattaattcacctgtcccaaatattcatagaatttttgtaactgttcttatttagttaaatccgataagtcttctcgcaaccgtatacgcaagtgaagacactcttcttcctgatcttcccggaagattcatcgtctgtccaagaattccataacggatcttcatataagtcctatagtcttttttcttcagataagcccacagttctttcttcttctcgaaattctctttcttcttagagcgaatgcataaaatagaagaaactgtcatcataatcgccagataattcaccatatattttctcagtttcttacttccgatcagacgcagctcatacatagaaatcattttcttcgttacgaaaagctgctggtcgattctgctgatcatcaccttctcattgactgactgatcctcacgtccgatgaaatatctgtaaagatctacattcatgtaataaagtgtacgtacatgtggcaacggataatatacataaatattatctacataaaatgtatgcttcggtaattccagctgacaaagcttaagcatctctgtacggtaaattacagaatgcatcaagatatactgatccagacggaaatgtccgatatcctcccatttaaaaatctgattctccggaagaacgttatcgtaacgaatgactttcttatgcgtcattccaaccttctcatatacatagttcgcaatgaccatatctacttcagactcatcttttacaaatcctttgatcgtatcaaggaccttcagcaatgcttcctcgtctacccagtcatcactgtctacaaccttaaaatactttcctgtcgcatgctccagtccacagttcactgcatctccgtgtccaccatttgacttcgcgactgcttttacaatcgtcggatatttttcctgatatcgttctgcgatttcctgagttccatcttttgatccgtcattcactacaatgatctcaacatcctcgcccccaacaagaatagaattgattgccttttccatatatgcctctgagttataacatggaattgcaaatgaaatatatttcatggtttttcctccattttaaaatgccgcctacggcgtcgcttccttttcttttacgtttgactatctcatgaacccgcgctaaccgcgctctactgcctgttacacaggctgttcattcgataatggcgtaagaaaagtaaatgccgcctttggcgtcgcttccttttcttttacgctcattatatcatcttttcgacttattgttgtaaattttctttttttcagctatagtaataacgaatcattaatatattattgagttcttagaatatattaacaacagaaatcgactatctcaacttaaaccaaaggagaaactttatgaagaagaatgcaatcgtcggacagtccggcggaccaaccgcagttattaatgccagcctttatggggttgtttacgaagcactgaaccgtgaggatgtcattggaacaatttatggaatgatcaacggaatcgaaggtttcctgaatgagaatatgatggatatgaaaccttttgaagtgaacggtgagcttgaactgattaagacaacaccgggatcttatcttggttcctgccgctacaagcttccggaagacctgacagacgctgtctatccgcagctctttgaaaaatttgagaagtacaatatcggttacttcttctacatcggtggaaatgattccatggatacagtaagcaagctttcccgctatgctgagactgtaaacagcgagatccgtttcatcggaatccctaagacaatcgacaatgaccttgtcctgacagaccatacaccgggattcggaagtgctgccaaatatgtagcatccactgttcgtgagattgcaattgacgcttctgtttatgataataaaaaatccgttacaatcgttgagatcatgggacgtcatgccggatggctggccgctgccagtgtccttgcccgtaaattcgaaggcgacaatccggttctcatctatcttccggaagttgcatttgatcaggaacagttccttgcagatgttcagaaagctttcgagcatacttccaacctggttgtctgcatttccgaaggaattaatgacggaaacggtaagtttgtctgcgagcttgcaagtgatgtaggcgtagacacattcggacataaaatgctgacaggctccggaaaatatctggaaaacctcgtgaaagaccgccttggcgtaaaagttcgttctatcgagctcaatgtcaaccagcgttgttcttccgctatgctctctgcgacagacgagaaagaagcaatcgcttccggttctttcggtgtgcagactgcactgaagggaacaacaggaatgatgatcgccttccaccgtacagacgatgcggattaccacattacttacgctccggaagatgtaaatctcatctgtaatcaggagaaaacagttcctttagactggatcacaggaaatggttccgatatcggacagcagtttatcgactatgcactgcctctcatccagggttctgtaaaagtaccggaagaaggcggactgccgaaatttgcttataggaaatgtaactgttcagagccaagcaaaatttcataaaacaggtgtaaaatgcttgcatttttaagactgtttttgaaattttatttggcggatacgccacaccgacgaaatgcgtagcattttggaggttggctctgaacagttactagatataagagagaacaaaacagagagaatacgtttgtaacttgcgtatcctctctgtttcgtttttcagagtattattcttctcaactatttttcagcacacattactctgcagctcgctcgatcagcagattctggatttcctctcttgtaggcattacgcgcagtgcaccttttcttgttgtgatcacagaagctgccgcatttgcaaatgtcagcatatctttcaggttttcttcctttaagtcttccattccatgttcacagatataatgtaatacacaaccgcagaatgtatctccggctcctgttgtctcaattgtatttttctgaaggaacggttttacctctacaatgcttccgttatagtatgcacggcttccttcttttcccatagatacaagaatcagcggaatctgatatctttctctgatccagtttacacctgcagtataatcctcttcacctgtcagccactgaatctcattgtcagagattttaagaatctggcaatgtccgagaccgtataacacctgctcttttgcctcatccagtgaattccaaagtggaggacgtaagttcgggtcaaaagaaataatcgcacctgactcctccgcaatacgaatggcttcttttgttgcttcgcgcactccttcatgtgtcatagacaatgtcccgaaatggaagatctttgtttctttgataagttcttcacaaatctcttctttgttcagcatcatatctgctcccggattacgataaaatgaaaaatctctgtctccgtccggataagtatgtaccatagcaagtgttgtatggatttctttatctgtgcataatccggatgcgtcgatcccaacttctgtaattgcatctcttaactgctctccgaaaaagtcttcacctacttttccgataaatgctgtcttatgtcctaactttgtcagcatcgcaagcacattacacggtgctcctcctgggtttgcctcaaaaagaggatttccctgattgctctttccgttttctgtaaaatcaatcaataattctccaagtgctactacatcatattttttcattttcttctccattctgctgccaaagcgacaacattttttctattctcaacagatttctattttttcacacaccatctgtactgatacggattcatccataccgagttcatctccagtttttctcctgtaaataaatcttcatattcaccttccagacaattcaaccatgcattctgtccatactccgagaaattagccagacagatcagttcttctcttcctgctgtccttctgattgcgaagactgaggaatttcctgtatcccatgtagagataccggcagtctctccaaagcaattttcctcacgtctgaattcttccatctgtttcaaaccattccagatcgcatactgtacagtacctggtttttttctcttctctgcattctcccactggaacggacttcgatgcagataccgactgtccgcagcagtatccgggtttttcttataattgtaatcattgacctgaccgatctcatctccggatgaaagcatcacaaaaccttccatgctcatacatgccgcatgcatcatcagcactctctggattccctgtttcacctgctcaagatctccttcaaatccacctttttcgattccacacagacttgccgttgttccacagcttctggcatctttggtcaccggatcgtaattatagagctctccacgagcaaagctgtacggatatgtcccctcaaagaaatgatataaatattctttgtgctgaatcggatctatctccagcttcttctcctgctcttcatccaggccccagccgatatcatcatgacagcgaaggtaattgacaaaatagcagttcttcggaagactgtgaatcacatccatctgatgcttcagcattcttgtgtctcttgtagccagtgctgcccacagattcaccatactggaaacaccgtataacatatggcattccggctcttgctctgttccaaaataaaccggaagttcttttggctccataacaacctcgccttttaagatcacacctgggcaaaccatttcaaggatcatacgcagcatacggacaatactatgaacttgcggaagatttctgcagttggttcccaactccttccaaatatacggaactgcatcaatacggaatacttccactcccatattagccagatacaggatatttcctatcatttcattaaatactttcggattgtgataattcagatcccactgataaggataaaatgttgtgagcacatgtctgtgcatctcttcacaccatgtaaagttgcccggcgcagtttccgggaacacctgcggcatcgtcttctcaaactgatccggaatctcgcgtgtctcataacactgatagcgatccatatattcctgttcgcctcttttggctcgcatcgcccactcatgcgtatctgctgtatgattcataacaacatccagacacagactgattccgcgttttctcagctcttttgtcaacttttccaactcttcgtttgttccaatttcaggatctacctgtttaaaatcctctaccgcatagccaccgtcattatatggatgcggcattttcagaagcggcatcagatgaagataggtgatcttctgctcagacaaataatccaaatgctctatcacaccgtttaatccccctgcaaatagcttcggatacatcgttatcccaagcatatttctgtttcgataccaattcggttctttttctcttttattatctaaccgtctaagttcagcaggtctgttctgataagcctcttccaatgactgcattaattcttcataacattgttcattatgatacaactgcatatatttttcgtgcagttcgttttcatgtctttttcttcttacttctatcatcaatactatatactcctatactacataaggggattccttaatcaggaatccccttatcattatccatgcattttcaatctcaatgtatatttatcatgtaacttctataccagatcatatttcactacatcgattttagctgcaccatcagcaaagaatgaaattccgtttgcttcctgttctgtaaacataacaacagacataacctgctcgccatcattaataaatacttctgcgctgaatctgtccagaatcacacgaagctttaactcattggcatctccatttaccagacatcttctctgatgaaccagtgctcgttcggttcctgaaaattttctgtcaattttcaatacagactcatacgggcggaagctcaattctgtatggaatttctcattctgtgcaaaacgtaatgcgaatttcttatatacattttctttatcttccggacgtatcacgagttccatgtcgatggttcgtccttcgacgcgatctaatgtgatcgtatcattatctattactacatcgttgtactcaactctgtttttgcgcagtgcatcgagttctttgattggagtttgataaagtcttccgttcttcacagacaattctctcggcagactcatttgcgcaaaccattttgagtcattacaacgatgagcaagcgtatcccagttctgcatccagccgatcataattctgcggccatccggtgcttccactgtctgcattgcataaaaatcaattccataatccacagactgattgaactgctcttttaaggtatatgtatccttgtccatttctcctatgatacataaagtgccgtttccggtatgatattccaaaccttccggtaacatatcctgcggacttgtcaggagaatgtgttttccatccagttcaaagaaatccggacactcccacatctttccgaaacgtttcttattttctgcaaggatactgacaaattcccagtcaaatccatttgcacttctgtaaagaagaatctgtccgcttccgtctgccggtctgcttccgatcacacaatagaagtttccgtcttttcctttccagatctttggatcacggaaatccactttacttgcaccttccggaagatccttttctgtcaagaccggattcttctcatacttcacataatctcttccgtctccgacagctaccgcctgtgtctgtatatctcttttacttccatcttctaatgtttcatgatctacggctgtatacataagcaattgtctgccatcatccaactcgattgcgcttcctgagaaacagcccatcttatcgtagtcttcatctggtgcaagagctgccgggagatattcccaatgcaataagtctttacttaccacatgcccccaatgcatactgtcccaatgtgtatcgtatggattatactgataaaataaatgatattctccctgatagtatgaaaatccattcggatcattcatccagcctacatacggactcacatgaaaagccggtctgtcttctgcttttatctgctttccctgttcatcttcatattttctagccttttctaacatctcactcatgcaaattctcctgttgttcgtatcgttatttttcttcacttaatgacttctgatactcatcaaagtacttctgtttaattgaaagataatctgaaagcccatactggtccattttctttagataggaatcccactctttttcaattcctccattcaggatccagtctgctttcttctgttctgcatatttttttatatctgtatcgtactgagatactttattcgtatcatcaatgctcataaagacatttggataaacatatttactgttcatatcctgtaaataagtttcatgcatattatccaaacgccattttgcatcttccggctgtgttacatatacatcataatattcatttaaaactgcaagaggaccatttaccgattgtgcctcacgaacttctaccggagactgtgttccaagatccatatgctttagcatttttccaccatctttgtttgtggacagttcaaaaatgttaaaggagtccttttctccataagttccccagttattctgtggtgattgaagtggtgcatacatctgatcaatccatgcagcagcaagtgctgtattccgacaacttgatgtaagaacacatcttccacggtcaaatccacttgtttcactgttgttctgtctcgtgatatttctcatgccattcggtcctgtcagcgccggtagcatcacataatcttcattgttatcaatatttgcaatgtcccatgtaaaacagagaccgtatcgatggttcttaccttttgctacataggtagaccactcttgtgtaaatgcttctgggtcaactaaatcctctgtcacaagtttatgtaaccattcaattccttctttataaccttcctgaacagttgtataaataacttttccttcatccgttacagcgaaatgatctcccgtatctccataaccttctccaaatccattgattaaaattgccggatcttggtctccgttattgataataaatgacattggaatcacatcaccttcgattgaaaattctttttcaagttcatctgcatgatcacggaattgaatcaatacctgttccaattcatctgttgttgtcggaatctcaagtcctagatgatccagccattttttgttaatatatggaacatctccgattgcctgaatggcttctttcccggctccaagctgttcaatccaagggaatgaataaatatgtccatctggtgctgtacacattgtcctatattctggatatttttcaaatactgcctgtaaattcggcatatatttatctatcagattttctaatggaataatgataccctgctttgcataacgcaatagatcataatcactcattcctgcattgaataatccgtccggtagatttccaaattgagcaagtgccagatttttcttatcagaaaactgatccgatacaaaacaagtccaatcaatatgaacattcgtctgctcttccattctctgaaagattactcgttcatttggctcctgtgttgatgtagccggtgcacttgtaataaaggaaagttctgcagtttccttcaatggaaactgcacttccgttgcaggtgtatccgggttgatttcagcttcaagctgctgctcttttccacaacctgtaactcccaccagcatcgtcagagatagtacaattgcaagtaatgcatttacttttcttttcttcatatctgtatcattcctttcttattagccttttaccgatccaaccataattcctttgtcaaagtacttctggaagaatgggtacattactaacagtggtaaacttgatactacaatggttgcatatttgagctgttctgctatttttgccatttccgctgtgctctgaatatcggcaatcatgcccggctgtggtgtattctgtactaagatagaacggagtactaactgtaatggctgcaaattcgcatcattcaaataaatcattgcgtcgaaataactgttccacattccaacgaaagaccaaagcgccagtactgcaatgattggcttacataccggaatcataattttaaagaaatgttggatttcattcgctccatcaatcgcagatgcttctcttaattctgttggaattgactgataataagttcttgcaagaatcatattccatacattaaatgctcctggaatcaggattgcccacactgtattaaccatatgcagttggttgatcaaaatgaatgtaggaatcattccgccgccaaaaaacatagtaattaagaagataatattaaaaacctttcttcctacaaattcttttttggacagtggatacgctgccaacaatgtcacaaaaacagaaataactgtaaatgcaagtgaatacaggaaggaatttaaaaatccacgccagatcatttcattctctaatactcttcgatatgcatctaatgtccagtccttaatattaaaactcaatccctggttattcaaaacagtcggatccataaaggatgcaagtactacatagataatcggtattgctatagaaaggacgaataaaccaagaatggtaaatccgattccaaggattactttgtctgtccttgaatattttttcttcttttttttctccatctcttctccctcttttctataatccttctccgtcattcagtttcttaacaacctggtttacaaagatcaacaagataacatttacaaccgaattgaagagacctaccgctgtcgaatatccataatctccgttcagaagtccaatacgatatacatatgtagacaggatttctgatgccggcaagttcatgtctgtctgtaaagcatatgctttttcaaaacctatactcataatatttccggcctgtaaaataaactgaattacgataatatttttaattgccggcaactctacataccagatctgctgcagaagatttgctccatccatggtcgctgcttcttccagctccttgcttgcatttgccaatgctgctgtatacatgatagatgaccatcctgctgcttgccagattccgcttgcaatataaattgttcggaatgcagaaggcattgtcatccagtttgtgctaattccgagtactttgttcagcggtcctacaggtgataaaagcatacgaaccataccacaaagtacgatgactgaaataaaattcggcatataaatcaaaagctgaactttctttttaatccctgtcttacggatgcgatttagaagcaatgcaagaataatcggaaccgggaatccccacaacagtccatagatactcaattttaatgtattcatcagataattcataaaatccggtgaagataaaaatcgcctaaaatactcaagtcctacccagggactaccaagaactccttttattacattgtagtcttcaaaagctatcaggagaccacccattgggagatacttaaaaataattgtcagtaaaagccctggcattaggaagaaaagatataactgccagtttttcttcatataagtcatcttttctctccacgttcgtttgcttacggactttgcttgattttgcattcttttcatgcacttcttcctccattcctttaactctatggaaaaccggttacgtaaccggttactttatagtttgatattactatattcttctatttctgtcaacacttttgtgcgataaaataaccggttacgtaactggttatttaagtgttgcgtttttccatgaaaattgctatactaaaagatattatgaaccatcagccatcatattgaaggagattcaacttttatgagtaaaaaacaggtaacttttgcagatattgcggaatataccaatttttcaaaaactacaatatcaagatatttcaatcacccggattcactgacggttgaaaaccaggaaaagatttcacaggctcttgatacacttggatataaaaagaataagctggcaaaggttctggcaaatggaaaaagtgaatttatcggaatcattgttccaaacctttatctgcactattattctgagatgctgacacaattcctttccagttacagtgattatcactataaatttcttgttttcgccagtgaacatggtgctgaagaagaacaacagtacattgaagaacttctgtcttatcagattgaaggactgattgttttaagtcacactcttccatctgagaaacttgcttcctatcagattcctgtcatcgcagttgaacgcgaagcagaatatatcagcagtgtcaatactgataactatatgggtgcacttcaagctacttccctgttgattcgggataaatgtgacatattaattcatataaatgtcaatgtgaataaatccatcccggcttatgaccgaatccgagcctttcaggctacttgcgaagaatatcatgttccatatgatatagatcttagtgtagaaggtgattcttatcatgagattttaaacgtaatccgagagattttcaataaaatagaagcaaaataccccaatcaaaaaaaaggtatctttctcgcgaatgatacctatgcaaatatgtttcttaatttaattttccaaaaatatggaacatttccttctacttatgagattgttggatttgacaactctccgattgccagcgaggcaatccttccgatcacaaccatcggccagcagattgatgtgattgcaaagactgctatggatcttcttgtccaacagatggaagagcagaaaaagcgtgttcccaaaccattaggtgaacctgttcataaacaaattgcccctgtattaattcgtcgtaatacaacaaaataatttatttttcatgattgagaacgttgcctccagcgccaggacctgattgccggttccggcgctgtcttctgatatctgcagatactgagtagtaatccgagcaggatataagatgtcagcatacctgatcttcctgttccaaagaatggacagtagattcccatattaccgactcctcccagattttctaatataaaaactactgtctgaatcaggaacaatgctgtacatcctgttcccatcaccattccaagctggttcttctgatttaacgaaatcttggcaaatcgaaggatcagaactaccagacaaagaaccagcagaatacctgccagtattccataagcagctaccacacttgcaagcagatggacacttccgtctacggatgtcagaagttctttaaactgcggattgccatgaaatgctgaacttccggaaatcatttcccagatcacattgactctcgggaaatctgcagcatgatcaccgattgataatatagccgctatacgctctttctggtaagccttgccaaaacaccagaggcctcccgcaagcagaaccggtatcagaacgactactgctccgattcccgtaagtactgcttttttacaaacctgaaaccagcctttgtaaacagccgccgccagaaccacacaataaaccaattccagtatcattgccgcgatcaggctctggcttcttatgaacagaaaataagatggaatgatcatccagaggattgcctttaaaattcctcggtatccctgacctctgtaactatataataccgctgcaaacaacggaattgtcagccagagtaagtcaatcagattcaatccaatatttccaaacggtattctaatatacctcgccgctccattcactttcagccccgtaaactgcagtccgaccactaataaaacctgatatacaatcaagatttgttttgcataagccgcaatcctcgtataatccatatagcaaatgccgatcatcagcacaagtccaatcaaaagtgccggcagttccagcgacgtatgccagctcgatgacattcctgtccagaacagttcttctgtttttcccgcactctgctcaatacctaaaacggtctgatacataacacttcgtaaaagatagcctgcaagacttaatccaacaattaatgcgatcattccccacgccattgtcggccggtggattctatccatctcaagcccgacttctaccggatcacccatttctcgaaccgcagcttcttctgcttctgtctgactcattccttcacttaggaattcctctttctgatcctcaatatgatcattgatctcctgttctatcgtccctcttgccatcttacagcgaatctgttctgttaatgtatgcaaatactcctctcgtctcatcaaacatcaccctttctaacaaactgctgcattcaacacattcactacagccgatgaataaattttccactcttctttcttctcttctaaaactttcctcccggttttcgtaatactgtaatacttacgaaccttaccaccgacctctttctcataaactgtcagatatttcttatcttccattccatgaagtaatggatataacgttcccgcctttaattcaaacacattctgggacttttctcttaaggtctcgatcatctcgtaaccatacatatccttttcagataaaagctttaataacaacatcgttgtgcttcccgataccagacttctgtcaactgccataacaattcctcctaatcttctgattttacgttaaccgtacacttcttaacattctcactgcaaaatgaaactcatcttgcagtagttcaagaatgcctctgcaatcctgccagagtctatatcagctggggattgactcccagctgatatatcggttatctatatatcttggcttgattatatatcgattatctatatatgtcaataaaagcttccaaaattctttgcatttttaatatagtaagagcgaacaagtagtaattatgagcgaacaatagcaaaaaagtcttattttgtattgttttttggatacaaaaactatactctatgggaaaaatatgttataatttgtgtacacattatgcagtataaatacatactagccatacaattcaagttgttgaactaatttaggaggagaactatgactgattctgttacaaataagatcattttaagtgccgacagtacctgtgacctggatcaggaactgaaagaacgttatcatgtacactattttccactccacatcattctggatggaaaagattatagggacggcattgacattacaccggaagaaatttatcagaaatattacgatgaaaaaattcttccaaagacagctgccgtcaatgttgcggaatatattgaacattttaaaccatgggtcgatgaaggctatgaagtgatccatatcaatcttggcagctcactttccagtgctcatcaaaactgctgtattgctgctgaagagctcgggcatgttcatgtgattgacagttgttctctctccaccggaaccggacttctcgtaaccgatgccggtcggatgatcgagcagggattgaaagcggaagacattgccgaagctcttcgcgaacgcacaaagcattgtcatgccagctttattttggatacgctgacatttctacatgccggtgggcgctgttcgacggtcgctgctctcggagcaaatgttttgaaattaaagccgtgtatcgaagtcagcacagcagatggcagtatgaatgtaggaaagaaatatcgtggaacgcttgataaagttcttgtgaaatatgtaaaagacaaacttgctgcttatccggatatcgatccatcgctgatttttatcacacattccggcattgatccggaatatattgaacttgttaaaaatacaatcgaagaagctatgcattttgatgagatccatataacaaaagcaagctgtacgatttccagccattgtggaccaaatacgcttggaattttatttgaaacctgctaaggaggagacgcctatgacgaatacaaaacctgtttttcatggaagtgatattgaaaaaatcagtgaatattatcatatcgaccaaaacagtattacaaactttgccggaaatgtaaatccactcggactttccccttctgttaaggaagctgttgcggctcatgtggacctcttttcttcttatcctgaccgggattataaatcgcttcgcaacacaatcgctgagtactgcgatgttcctgctgatttcatcctgccgggcaacggttcaagcgaactgatttcacttttgattgaaacaagagcaccgaaacgcactctgattcttggtccaacctattctgaatactccagagaactttctttctccggaagtacacaggactattatcatcttcaggaagcggaagattttgaattagatgtagaagatctttgccggactttgttaaacggatatgattttctgattctctgcaatccgaacaatccaacttcttctgccatcttaaaagatgaaatgcgtgcattgctttccttctgtgcaaaccgcgatatctttgtcatgattgatgaaacttatgtagaatttgcaccttccgttcaggaagtaaccgctattccatacacgaaagaattctctaatctcatggtactgcgcggtgtgtccaagttctacgcagctccggggatgcgttttggatacggcattaccggaaataaagagttcttatctcagatgaaagaaaagcagattccatggtccttaaacagccttggagcatatgccggtgagcagatgttcaaagacacttcctacatccgccagacacgtgcattaatcctgacggaacgtgaccggatgtttcttgaattaaaaaagatgtcttctttcaaggtttattttccatatggaaactttatccttgtgaagattttaaaaccagaagtaacttctttcgatgtattcgaagcttgtataaaagaaggacttatgatccgcgactgctcttctttccaatgtctggatggcgaattcatccgcttctgcattatgaaacctgaagacaataaccggctcttaaaagtattgaaaactatttaatgataccagggtcaaaagatctgaaaccaccggtgcttgcacaaaggtctttcttaaaaagcgggagaatctgatctaacgattctcccgcttttcttcttattctttcttttggttttatacttccttgctttttctatgattctacagctgttttctaacaacaagataatcatctccattccgataataaggacattgatagtgctgatttgtcatcagacggatgtaatcatcctcatccatattcttatcacagagataacactcatactcctcgtcataaatataataagtgcatgtttcacagctggttcttgactctttactcaattttctctctccatttcccgcccgttgcaagggcctgtagcattgcattctgttgctgttcgttctatgtgcagctggcaactcttttcttagtatcataccatgtttccatagattgcgtccacttttctgtctaatacaattaccttaaacgcaattaatagcctgtattttttgtgttttatttcttattttctgtatatttaaattatttttaacttttttctgattttctattgacaaatgcccatctgtgagttaatatagaatcaacaaaaggaaacgaaataaaaaacaaaaaggaggacaaaccaccagacacttaatcctttcattaaaattaattttaaagaaacagaggtatagtccaatgggaaggtaaattaaatccttaaaaatctaaagaaagaggtacagaccaccagaaagagtaatttaaaaaacggaaacgatatttaaagagagagaggtagaatccaatgggatagttcattaaatcatcaaacaaataaattgaaagaggtaaattccaatgggacgataagttaaaatccaaaatagataaaagaagaatcgaaagaaggatattccaatgggataattaaatgaaataaaatataaaatcactatttgagataatagtttcagatagatatcaagtaaataaggaggaatattccaatggatggaataacaaagtgaagatccactgtatagcgtaggtgcatacggtggattttcttttgtctctttttcgtggatatcccggataatcaaagggataacaaaaaggggcaaagctttttatgcttccaccccatcacttaaaaatgtttaaagtcttaatacatagtctttttattatctcttcacaaagtactcttcataccatacaaggaacgtatagattgtccatacttttctccagttatcagaatttcctccaacatattcatcaaaaatcgcattgattgcatccacatcaaagaatttctctgcaatatcactgtggaagagacgctgtacgtcttgattgtatctctcatcagccatccagatacgaattggtacgatgaatcctaacttcttacggaatgcaatttcttccggaagaactttcgcagctgccgtacggaatgccaccttattctgctcttcatttactttaaagcgagacggcatacgagatgcgatatcaaaaattcttctatctgtcaacggcatacggatctcaagtccggctgctgtactcatcttatcaacattcaggtaaatatcaccttccagccagatctgaatatctacatcagacatctttgtcaacggatcaagaccttctgtctcctcgtagattcctcgtgcaagttcaatcggcagtacgtctggatcgtatttcttaagaatcttctgcttctcgtcttctttcatgatattggtatttccaacatagaaattcttcagattctcaccataacgttcggcgtttctgtacatattataaccaccgaagaattcgtcagaaccctctccggaataacagatcttcgtatgttctgctgttgcattacatccaagtgtaaatacaatcgcagatgcatctccaagtggttgctccatattgtacataacataaggtacaatatcaaagaactgctccggtgtaatgatacttctggaaaattttcttccaagaagctgtgctgtcttctctgcaagaacagattcatcaaatctctcttcctcatatccacaacagtctgcctgttctgcatcagacattgcaagcacataggaagaatctacaccacctgacaggaatgactccactctctcatctgcggtcttcacttccggcatgatttctttcagagtattatggatctcatcagcccaatcttccagagtcttgctctcatccggatggaattccggtttccagtatctgtgaatctcaagctttccatcctgccagatcagatagcgtcccggtaacagttttttcagtccacggaaaaatgtattttctccggcaacataggtcagacttaaatacagctgaagcatctcttcattcagttctttcttaaatcccggctgatcgataatatcacggatcatcgttccataaagaagctctccatcttctgtctcatagtaatagaatggttttgttccaaactgatctctcagacagaaaagcttctgctcttcctcatcccacagagcaaatgcaaacattccgtgcatatgatctgccatctcgcatccccatgtctgatatgccttaatcaaaatctcatgttctctttcttctctggaaagtgtaagatcaattccaagtctctcacaaagttcttcccagttacgaatgtgtcctctgtatgtttttacaattatcatctgtttaacctctcttttgtcaccatctttggtttttgaaagttgtttcttctcccgcttatatcctacagatatcgacaactttcacggttcaatcctattctatcacactgactttttcttgtaaattctcaactgtcactctgatactaatctcggtctgaagcatatataacatatgtattttagtcagaatgcatctcaccttcattcgcttcttccattttcacttcttctgctgcgctacttccagctatctctgcatcaacataaccaaaacgaattactgcctgtggccagttaaggctgattcttggtttcttccctttctccgcacctgctttttcaatcagatcaagcaattcttccagaactgtttttgtcagataacctccgcgccagtgaaacgtcagaattcttcctttctttgccatctgaagtgctcttttgtaaacttcttccggttttgtaaaagacagtttcttttctttataatagaaatgatctccatccgtacacttcatagccggagcgatcaaaggctcatgatcccggaaaatcgatttatcttccagattgaaataatcataacggatttcttctccgatcgtacagtttcttgtaagtgtattatcaaatgtcgcatctaaatgataatatttcccattaatccgcacgatattccatgtatgacggtatttgattcccttatccggattattcccgcaaatagcgatcatacaccagactccaagctcatcgcacagcactttcaccgcttttgcaatcccctcacaaactccgacaccctgtcctaacggaccaataatttcatgtgaataaggtttcttcaatttatcatattttacattttcacaaatgaaatcatgaatgtatttttctttctctgattctgataatttctgcgccggtcgtgcaagtttctctactctggatttcattgccttctgatgttctttcaccttcgcccggtcaaacaaatattccggcataaactgaatgttcggcgattcctgataataacgatacttaaatcccgttgcccagaaaatctccgggtgatccaggcgcatctggaagaatacattatacagttcttctccgctcatacgcggtacctgaatctccttctccatccgcaagacgccctgacagattgcatgatacgttgcttgctgcatcttattcatcttactataataaaatggttccatacttatcctctccggtcagcagaaaattcttctatctgaacttttcgtttttttcctttcttttcccagatcatcagactgattttgtattggagtgaatctcttgatgcaataaatggttcctcacgaaatatatttatccgaaatccctgttcttctaactctcgtttccgctctgatgctctcttctcagtcttacgattctgattttcttcctcatctgtgaattttcttctcgggtaatttgctgctgccatcttcagttcttccatcaaaagatctgtgacttctgcatgacgcttttcctgaaacatcccggcaatcttttttgcactccgcttccatggatgtttctgataaaactttagacatcttagtaactttttatcttctactgttgccgcaagctcctgcatcacttgatgtgcttctgctgacggtacccacggattttcccttggaactacatattgctctgaaactgccggataacagcaatgattcagcggcggaaagtccgccagcgcagctagtttccgctccgtctgattacagtattttgctcccagataatccagtttatcccgtacgattgcaatcttatattctatctgacgcagatattccgcacctttcacccagaaatgtccgatttctccatagtcatataagtgtacttcttcacttaaatcctcaaaaaaaatcgtaaccacggtctcaccctgatgaactacaaggacataggactcctccggttcttctgttacacttaactccgcttctagttcaccttcataatcctctctatactgacctgtcatccttgcattttcaaagacaagaaagctctctaccgcatcgttcatcaaataaaccagccgcagtttttcttctgtaaaaagcagttcaaactgtccctgttccagcacttctcctagtttcagaaatgcttccggcaattgaatttcactcattttccgctccctcagtgcatttgtcttccaggcactcacgaatcttgtcttctttcaaatcctcaccgatcacgatcagaatctcctgtccttctttgattggatttactatcatcttctgtgttgtcgcattcagctccatccagtcaccggattgattcttcataaatccttttacacggaacacttttccgatatcattaagatttttattgttttctttttcagaatcatctgtgcatccacgtttaccaaacagctttttcacagccggaaccagttcttcttctgtccgattcagattcataaaatataaggtctggaatccatccttttctgtaccttccggtctgcgaaacgactcaatctgatagccgctgttctgaatctgtgcaaaatcttcctctgtcagcatatcccagtcttttgcgatcacttctttttcaattcttctagtacatccaatgcgttcaagagagcgattgacatgtgaaataattctgttttcctgttcttcacaagcattgtccttatccagcctgctcagcacgatcacaccagcatccgccgcctcagatcccagcaaatattccgcctgatctgacagattttcttccagtcccgcatctacgattgtgatcacacttccgatttcgtaccaccgatccagaggttcttctcttaatccatcaaaaaattcatccacgtcatagattcccgacggctccacgattactctgtcatatccacacattgccatagagatcagctttgtcttgaatcgtctgcggtgtgtctctttatcacaccctccagaaatcatttccagttcacatttttctccctgcagctcctgaagaagcatcatatccacattcaccgcaccgaaatcattttccagaattccgatattcagaccctgacgaagcaggtaggatgcatactcttttataaatgttgtctttcctgcccccagaaaacctgtgatcaaatctatctttaccatgattgttcctctcatatctgatatactcgcacaatttactctaactataataccacaatctccttgcatttcaagaattcctcggcattcttctgcgcatctctgtggtcttgccagagactatatcagctgggggattgactccctcatttgttcaagaatgcaattgcatgacatacttctactgcgcacctctgcaatcctgccggaggctatatcagctgggagatgactcccaccactgatactagcttgtttctcaccacctatagagatgggagtcatctcccagctgatataaatatagagtattgaatccaccgcctgttttccttataataaacttatcaacaataaacgttattttttacgagattttcaacattttcatctcatcaaaacacactttgtgaagacaacgcttacgaaacggagaatttattatggaatttcagaagatcagttccccttccctgagggatctgtttattgaacaattagaacatctgattctttccggcaagctacaggtcggagagaaacttccgccggaacgccagcttgctgaaatgatgcaggtcagccgtgcggttgtcaacagcgggatcagtgagctggagaagaaaggattcctcaccgtaaaaccccgcagtggaacttatgtagcagatttccgcagaaaagggactctggatacattgattgctatcatgaattataacggcggacgcatgcgtgatcaggagattcgttccatcttcgaagtccgcattgcgcttgatacgcttgctgcacagctcgccatcgacacgatcagcgacaaaaacatccagcgtctcctcgaattcgttaatcagatccgtgatgcacaggatgtcaccactgccattgaagctgcttacgaattccaacacgagtttgccctgatttccggaaatacattgattccacttattttccagtctttccgagcaccgatttttaatatgtgggaacgttattgtgaactctatgggatagaagaattatatcgaagcaattataagacctggacctatatccgcgaccgggacacccaaggagcgattgcatgggttcaggaatctatgcaggactgcattgatgggaagcatcagatttactatgaattgtaaatttgtatttagacgtttgaattctgagtaatgaagcaaaaacttttgttggataagggcgtgatgtggatactttattgcatcggacaccggcccgctcctcttcatccctttgaatgaatgtaacgaaaaagcccaaacaggcatcgtgagtgatttctgtttgggctttttctaacattcagaacaaagtgtattcagaaccgctcctgccttaaaatgtatcctcaacaataaagtatccacatcactcacattatccagggcagaagtgattgccgtggaacaaattcaacacttaaatacagaatttcggacggaagtaaaaaagggaatgctatcgactgaacctgagtctatcttctcgtttacgtacatcaaatcaaaacttgtatgaagtctttcagattcgtcccgttgagcaaacaaatctgtttggaataacaaagcaaggatggtgctatattgttgaggacacatgtaaggcaggagcgttccgaatacaccttgttcagtatgttagtaagagccagacaggcaccactcacggtaactgttctggctcttacgttacatactttcaaggggatgaggtagagcgggccggtgtccgatgcaatatagcatcattcttgcggccttattcaccaccaaatcctttgcttcaatatggagaatcagatagacaaatacaaatttaaacttctgctctcgccattgcttccttataatccttctgatctgtaaaaatctcattcttataaggattcttcttctgctgttttgctctcttaataattgcagccagacagatcacattcgctgcaagtgcaattaccgcgatcacaccctgcatggttggattagcacttgtcggtcttactgctgcatccatgaatccgtcagaatacagagccggaattactgagaaacggcttgcatcctggaataatgggaatacctgagcaaacatacaccacagtgccagtgtattcgcacggttctggatccagccacccttgttccagaacatatttgcaaatgtcggagcaagaagtaatgcaacaccacagtagaatgcatgtgttgtcaggttattgtatgtgtactcaaaattccacagatcatatgcaataatgaagcaccatgtcatatccggccaaagcatatcgtcatgcttcttggatgtgtagattccccaccatcctgtcatacagaaaatgttcaggattccggcaattccgttcacccagttccaccatccaccatagagccatacattttctgaagacagccaccagcggtcaccgaattctttcattgccatgaatccacggatacctgattcaaaatcacttactactgcaatcagaatattgattgcaacgattgcaaacgggaatactttgaaccattctgtcttaccaattccccatttgtatttcagcatcataaaaccaatacaccctgctgttgcagcatacaattttgcataatggaaccagcttgtcatatgtacataagtatcgttattcagtgcccattctgcaccatttgctgcacagatatagattgcgatgaaatacactgtaagtatagccggaatagctccaaaacagatcagtccaccgatttttgtacgtcttgcgaattcatttgcaagaacaagtccggcaaacaccagtacccaccctaacagctgccaaccggcaccatcgccataaatttggaataacataattatccccctccttcttttaattggttataccaacctattgttatctttttaacattatactcttcttattattatgcgtcaataaatgcacctgtttctcctatttttcagcactttataataaaatatctctccgtatttttgtatttttacaatagatttgcgctttggcatctggtatgaccacagccacatcattttctttctgacgattcagaaaattcatttaagcattcttatttttgagttatctaacaattcaatattcattttattctgttttatgcgtacttttcttgatttttttcatgtttttgcaagaatacatatatatttcttgcaaattccacctcaactgtttataattacattaaaatgcattatcaagacactagaaaacatatatgtattgtgaggatgaaaactatgaattcaaatgatatattaattgcaaacactgacgatctgcgcagtgatatggactatttagagaaaacacttttgaaaggacaccgcattgatccgaatctttatgaagaatatgatgtaaagcgcggacttcgtgattcaaccggccgaggagttcttaccggactgactgaagtatccgatgtctgtggatttgatgttataaacggacgtaaaattcctgctgaaggtggactttactatcagggaatcaatgtcaatgaccttatcaacggtctgaaaggcaaacgttttggatttgaggagacaactttcctgctccttttcggacgtcttccaaaaaaagatgaattagagcattttctgaaagttttatctgaattagaagatctaagcggacgttttgttcgtgacgttgtcatgaaggcctcaagctctaacatcatgaacgcactccagcgctgtgttcttactttatatacatatgatgagaacccggaagatatttctgttgaaaatgcactgcgtcaggctcttgaacttattgcaaagcttccactgatcgcagtatattcttatcatgcatacagacatttccgtaaagatgagacacttctgatccgtaatccggagaaaggccgctctcttgccgaaaatattttgtacatgcttcgtccggatggacagtatacagaactagaagccaaagttcttgatgttgcactgattcttcatgcagaacacggcggtggtaacaactccactttcactacacatgttgttacttcttcaggaacagatacatattcagcaattgctgcttccatcggttctctgaaaggacctcgtcatggtggtgcaaacctgaaagcgcaggggatgtttgatgatattaagaagtctgtcaaagactggactaacgaagatgagattcgtgagtatctccgcctgattcttgataaaaaagcctttgataagacgggactgatctatggaatgggacacgcagtctacacaatctccgacccaagagaaaagattttgaagagctatgcacagaagcttgcttctgaaaagggacttgacgatgaattcgcactttatgaccgcgtagaaagaatcgccggtgaagagatcatgacacacagaaagatgctgaaacctgtctgtgctaacgttgacttctacagcggatttgtttatacaatgctgaatattccggaagagcttttcacaccactcttcgcgattgcgcgtatcaccgggtggagtgcacatcgtctggaagaactgttaaatgccggtaagatcatccgtccggcatacaaatatgttgggcagcatacagaattccatgaacgtgatgacagaaattaattatttgatacctgattattattctaagttcacctgcatcgccgaccgctgtccgatcacctgctgccaggaatggaagattggtgtcgatgcagatacgaaccgtaaatggaagaaactccaggctccggaaaccgtacctgaacaaaagaaaaacttaagcgcttatacgattaaaaaagatggacagcgtgtgataggcctggacagtgatcatcgctgtccattccttaactctgagaagctctgccgccttgttgttgcttatggcgacaaagtcctatcagaaacgtgcactacatttccacgagaggagcatcgctttccgacacataacgagaaaatgctgatgccttgctgccctgcagtgattgacctgtggaacaaacagaagtccctgcatttcccaaatgtatcagacactttgtccgatactggcgatacagatacttctgtccttttcctcttgcgtgaaaaactactcaatcttttagatgattcttccagaacaatcgaagaagaacttttggaaagcttctatattcttcaggaattgtaccagcatcagccattaacaaaagaactgttagaagattatttttctgatagcacagtgagagaacttggaaatgcgatctcagatatagaccttccacctttggatctgatcagtgaatgcaacgaactgctacaagatctttccgtaaactatcaaaaagaagggctctatcaggatactctgaatccaattcttgctttggctgaagaaatatcggaatcactttcggacagtactgaaaatcctgatgatactaaagcttacgaatccactttactggaacaatgggaacaattcacacaatacttgagcccttacgaaccactgcttcgcaatttcctgcgcaacgagattttctccgatctcctgcttcctgacagtgacctggaaaatgtactggtacagatgcaatggattgcccttgaatatgcatcaatccgccacagcattttcttaagatggatgctggatggcacagacgcaaacgtttctgaaatttcttacgaaacgttgagacaatatcttgtgatcattacacgaatgaccggatatgaaacagcggatatttatgaatatctggaaaacagtttcgaatccctcttatgggactggggctactttgcattaattataggaaactaaaaaaggattatgtgattggcacaagtactttttgccttttacataatccttttttcagagttatcacaaactatctcatgcaaatatacacaacatacactgcataaagaagtaacatgataataccttcttttctattaagttctcttttcgtccatgccatgatccatccaataacactgaacacgatcagcactgcaatatcaatgatattttctgtcaaaaatgcgaccggtgaaattgctgccgcaataccaagcaccatgagaatattaaagatattggaaccgattacatttccaagtgccatatccacctcacctttttttgctgctacaatcgatgtaaccagctccggaaggcttgttccaaacgcaactacagtaagaccaatcagagtctgactgattccaattgccgccgcaactgtacaagcaccgtctactacccagtcacttccgaccgcaatcgctactgcgccgagaagaatgtaaatcacactctttcccatagacatttcctgaatctcctccgcttccagaagatactcttcctcttccactcccggctccacatttttctcacgagatgtctgtgctgagcggatcatgtagaggataaacgccaggaataagataataaatacaactccatctatatgtcccagtgacattccggctgcaccaagaatcagaagcaataccgcacacagaatagatatcggaaaatcaatctttaacgtattaatctgaactgccacggaagtaaaaagcgtgcaggctccgactacaaccatgagattgaaaatattagatcctaccgcattactgactgcaagtgcattgtttcccgtaactgctgccgtcacactgaccgcagtctccggaaggctcgtccccatcgccacaatcgtcattccgatgatcagtgacggaacatgataccgtcttgcgatactgctacacccctcaacaaatgcatctgcaccttttacaagaaacacaaatccaataattaaaagtaccactgcaaatggcacactttgaaacaaatcactcatcttttatttcctttctgctatactatattcaacctcattttatgctaatccagacagatgctggatcaaaatcctaacacctaaaagcaccaggatgattccaccaaccagttctgccttatgtttatatttcccaccaaaataatttccaatcactacaccaacaatagaaataatcattgtcgtaattccgatgatcgtaattgcctcaagaatcggtgtgtccagaaatgcaaatgtgattccgactgccagcgcatcgatactcgtcgcaacggcaagtacaaacatatttctatgatccaacggctgatcttttacttcaacaatatcttcttcgttccattcttttactgcctccagaatcattttcccaccgataaagccaagcagaataaatgcgatccagtgatcaatacttgtaatatacttttggaactgaattccaagaatccatcccacaagcggcattaatgcctggaaccctccaaaatacaatccgatcactaccgcctgtttcttattcagcttcttcattccaaggcccttacagacagacactgcgaatgcatccatcgcaagcccgacccccatcaacaaaagctcgataaatagtgccatgtttctcctcttttcttttttcttctgtatctgttccactacaattacagtgcgcatcctgagcggagcgttttttatatattaggaaaggactttcctaatatataaaaacaaagagacccacgtatgttctatgataagagaaccgctacttgatataacaagcttatcctcttatttttaaaacatacatgagtctcattctttaagatttgccaggtgatcagttcaagtgccttctcaccggtatgttgacaaatcacattttcatgcgaactactccctcacggaatatatttaatttatctttcggctcggttcgtctcatggacaactgcctcactgacacatcgtttcttactataacgaatgaattctgttttgtcaataaattttatcatttattcccagacgatttattcctagacatttcattggtgtcacagtaacagctttccccattagaaaagcagcattccgattcctctcgtgatgattgccacaacccatgcgatcagacactgccagaataccattccgacagcccattttgcaccaagctcacgctttactgatgcgaccgctgcaacacacggtgtataaagcagactgaatacaagcaaaacacctgctgacaatggagtcagtacggatgcaattccacctccgaacaatacctcaagtgtagatactacactttctttcgccataaacccactgatcagtgctgtacagattctccagtctcccagtccaagcggacgaaggattggaacaagtgcacccgcaatcatagcaagaatactatctgctgagttctccacaaggttcagatgcaagtcaaaactctgcaagaaccatacaacaatcgttgccatcagaataactgtaaatgctttctgtaaaaaatctttcgctttctcccaaagaagctgtgccacattcttcgcacccggcagacgataattcggaagttccataacaaatggtaccggttctcctttaaacagagttcctcgataaaggaatgcgattaaaattccaactacaattccaagcacgtacagacccgacatgatcagtccgcccttacccgggaaaaatgtacttacaaagaatgcataaatcggaagttttgctgtacagctcataaacggtgtcagaaggatcgtcatcttacggtccctctcactggtcaatgttcttgttgccataactgccggaactgtacatccgaatccgatcaacatcggcacaatgcttcgaccggaaagacctatcttacgaagcagtttatccattacaaatgccacacgcgcgatatatccactgtcttccatcatagagaggaagaagaacaaagtaacaataatcggaagaaaactaagcacgcttcctactcctgtaaagattccgtcgatcacaagacttcggattgcatcatttacattgagtgcgagcagtcccgcctcagccattcttgacaactgatcaattcccatttccagaattccttgcagaaatgcaccgattacattaaatgtcagataaaatacaagcaccatgattccgataaagcatgggatcgctgtatattttcctgtcaagattttgtctatcttctcacttctgacacgttctttactctctttcggtttcacaaccgtctgctcgcagagacgctcgataaaatcgaatcgcatatctgcgattgccgcacttcggtcaacctcacgctccgtctccatctgctgtacaatatgctcaagcatatccaactcattctgatcaagctttaactgttctaagatcagcggatccccctcgattgccttcgttgcggcaaaacgtaccggcagctttgcttcttctgcatggtcttcaatcagatgaatcactgcatggatacatctgtggaccgcaccgtcatgatcacttttatcacagaaatcctgacgcagcggacgctcctggtattttgccacatgaagtgcatgacgtattacttcatccacaccttcgttcttcgctgccgaaatcggaataatcggaactccaagcagtgcttccattgtattcacatcgatagatccatgatttccaatcacctcgtccatcatattcaaagctactaccatcgggatatccatttcaagaagctgcattgtcagatagagatttcgctcaatattcgttgcatccacaatgttgatgattgctttcggatgttcattcaacacaaaatttcttgaaacaatctcctcactgctgtatggagacattgaataaattcccggaaggtctgtcacattcgtattcggataacctttgattgttccatccttacggtctactgttactcctgggaagtttcctacatgctgatttgctcctgtgagctgattaaacaacgttgtctttccacagttctgatttcctaccagggcataagtaagcactgttccatccggtaacggattagcatcttcttcagaatgatactttccttcttctccaagtcccggatgatctaccggtttcaaacgttctccacgggaatggctgtttgttctctcgctgatttcctcaacttcaatctgttctgcctctgcaagacgaagtgtcagttcatatccatgtacctgcaattccattggatctcccatcggtgcaaactttaccactgtaacttccgcacccggaatcatacccatatccaaaaaatgctgtcgtaacgcaccggaagccccaactgtcctgatcacagcactctttccaatcgctaattcttttaatgtcatttttttatcatcctctttagcttattgcgattttttatcaattagttatacaaaactagcttattccaggatgttggatttgtcaataattatcatttacaaaatgctgtaataaaaaaagaaatgcgttattccctcttatattttgggaaataaagcatttcttttttcattatatagcagcctctcgttttttcagtggcgcataaacgattcttctgacaaaaataaagcaaatcacctgcaggatgatcgtaatgatccaggataccggataggaaataaacaaaatcttcaatgatctgaatcttggaaatattccaaagatccagacgattctcgttccgactgttccgattacggaaagtatcatcggcacaattgattttcccattccacgaagagatcccgggaacagatccatccatccgcacagaaaataagtaactgttgtatatagaagaatctccataccacagctgataacctgaggatcatcagtataaatcttcaaaagctccggtccaaagagatacgcacctccaccaagaattaatgcaatcgttgtggaaagaatcaggcagtcaactaagactctgtccattcgtttccattttccgactccgtaattctggcttgtaaaactcatacatgcctgtgtcactgcattgatcgatgcatataaaaatccaaaaatgttattcgctgccgtatatcctgccatcgccacggatccgaaagaattgaccgatgactgcagaagtacatttgagaaattgatcacagtactctgaattcctgccggaattccaacctgaaagatctgtcctaaatatactttttttatcattagcttcgagaagcgaagctgataactgctgtctgatttatacaggcaacgcaataccaatacacacgatacaaactgtgctgttaccgttgcaattgcaacgcccgctactcctaaatgaaaagcaattacaagtaaaagatttaaacatgcgttaatcacacctgctacaatcaaaaacaaaagtggtcgtttcgtatctccaaccgctcttaagattgccgctccgtaattatataacataaaaaacggcattcccaggaaatagatcttcatatatagtgtcgaaagattgatcacattatccggtgttcccatcaactcaagtgctcctctggaaaagaacaatccaactaatgccatcacaactccgcttataatcgcaaatgtaatcgctgtgtgcaccgtctccgacatctctttctcgcgccctgccgcatagaacctggctgcaagcacatttgctccaagagatattcctataaataggttcgtaaatacattgatcagtgctgtggttgatccgactgctgccagtgactcacttccactgaatcttcctaccacaacaatatccactgcgttaaatgcaagctgcagaattccagatatcatcagcggaattgaaaaagaaatcagcttattcatgatcgagccattgcacatatcaatttcaaatctgtttttcttcttttctgaatgcataacttttcctcattctataaattattgtaactgttcaaacactctcttaatgctgtcataatgaaggaagattccctccttggcaaagttttcaatctcctccttagttgcgaacatatatccatctgtttcttctgtctgaagtttcagatcattctcatcaatatcaagcacaaagcgatatacatcaacaaaataattatcaccctcgcccggattttctcgcttataagtaaatacatatccgccttctgcattagaaatatctaatcctgtctcttctctcacttcacggcataccgcttcctcagaagactctcctgcctgcgctgcaccgccggatacttcccaccaacccggtgcccacgcttttgtcattacacgtttcgtgatcagatatgttccatccggtcttgccacaactccaagcactgtcagatggtattccccatcctttaagcaccagtcatttcgcttcattgttcttccggtcggccgtttctctgcatcataaatatcccaatattccatgatattttctcctcgtcttatctatctcatgtttttcattttcctttcttatcatacatttttagaaaaaagctgtaaagtctttggcaaatattttccattagactttacagctttcactatcattcgttatttacttctatctcagataatatgtcatttcatgccattcttctccaccccagacagaatctgacattcccagatctacaaacccaaatcttttatacatctctactttttcatccaggcaggtaagaacaatttcttttcttcccttttcttcttctctttgcagataacatcttacaatttctcgtgccagaccttgtcctcgatactccggtaatacatctaagccaaggatcataactttctttccttttggattattcaaagatgcatctgtaaaaaattcatctcggaatttttcctcatccgttgcaattccattcaaaaatcctgctaacttcccagttgttttatctaccgcgactaaaaacaattctggagtcacaccgattcgctccttcatgtgtttctcagaacatgcttcatttggcggaaaacaaattttctcaatcaagactgcctgatctgcctcttcctgtctaatatccctgaattcaaatctttctaaaatactactattcccttcaatctgtccttgcattttctaatctccttcttcatcaacttttgtaataacatatttgtaatttcatactgtcaccgtaagtactgctcctacagatgctaccaacgacgctgctactgctaatatctggaacggcaaactaccaagtcgtccgcaaatcaggctagttcccgcacgttttctggaacgattgtatgcaacaatcactcctactcctgtcagaacctggaccacacttgccattcttgtaaaccctacaaagctctgcactcccacaagtgcgatcacaagacaaggtaatgtagctgcaagccagctgatcttctcgccccatttcgtctgttcattcacaatatctcgaagattcagtgtatttgcccagaaagatgttgcaagagccaacagtgaaaaaacatatccgataatgctgacccatccgccaagatggccggaaagatccaccagtgctccattctctgtcacattagaacatcccagaagcgtcataaatgtgatcaaaaggatcaatcccatattcaatcccgtgccggctgcaatcgctctgcgaatacctttttcgtctccttctagacctttcacaacctgtggcacagacataacagcagataatgaaaatgcaatcatgctataaagtgccagcatattgttattcgaatagaactttgtcgaaagctctgttgtctctgaaagcatcgttgctacaaaaaggatccctatgactccaaacatggaaatcactgcaattttctcacaaattccaaccagtttcattccgatatagaccacacttgctgccaatacataaaagagcagcattccgaccactgacggaaggtgaaaccatgcagaaaatacagctgccgcaccggtaataaatccactcacattcactacaaccgaaaagccaagcagcccaaacgccagccatgtacatgccatcttcagctttcccacaaacagctcattttcaaagcatttgataaactgcgcgccattgttattcaaagacagttccgcaatcataaaatgcagtaaaagattcatgcaataagccactgctgcaatccaaatgatatcatgccagttatttctggatgcaaggaatgggaccgaaagaattcctgatcccacgccgtgtcctatgataatactcgtcgactccaaaaaagtcagctttgattccccatgtactttcgccatacctacgcctctccagtaataccaatttgttgtttaccacttatgatgacggaaaacaatctcaaatctgatatgataactctttctattgtacctcattatagcttataattaaacccatttttaaagagctttttcccaggcattttatattctccaggaactatgcagttaatcatattttatgttatactcttaatagaaatagctattaaatctaaacgaaaaacagaggtaactatcatggaattcaagagcattttaataaaggacacaactgtagaagaaagaaaacagattgtaaaagaatctttaggcaacatttctgcaagctgcgatggttgcatggcaagactttcagaaatgtacgatgagtatatcgaaggtaaaaaagagatccgtgacattaatatggaatttaatggacactatttacgtggagacatggacaagggtgaaagaagaagctgtccgatgtaaagtaaatctactccccttttaaccttcactcaagacctactgatagaatggaggtgtttgtatgaaatttaagaaaagaatcgcatttttcacagcaattatgatggcactattgactgtcggatgtggcagcaaatcaatgtcagcatccgaggacagtgcaaccatggaatcagtctacggtacagattattcaaaaaacgaatactgcgaagaacctgcagaaacagccgatgcaggagtcacttccggaaatggactggaaactcaggtagaaaacggacgaaaactgatccgaacggtttctctttctttgcagacaaaagaatttgattctgtactcaatagcctaaaaacaaaaactactgaactaggtggctatgtcgagaattcttctatcagcggcaatagttattcttatacaacaacccgatatgcaagctacaccatacgaattccggcagacaagttaaatgagtttgtggatatcgttggtgaacttggaaatgtaacacaggaaaatgaatccgtggaagatgtgacacttcagtatgtagatgtcgaaagtcataaaaaagctttagaaacggaacaggcacgtttgatggagctgctttctacagcagaaaatatggaagacctcttagccattgaaagtaaattatccgatatccgatatgaaatagaaagctacgaaagtcaacttagacttctggacaatcagattgattatagcacagtgcatgtggagatatttgaagtcgaacgtatgacagacgcgggtgagaaaggcttctttgaagaaatcaaagaacgattcggagacaacctgtataaagtaggtcacggtttcaggaatctcatcattggaattcttggtgcattaccgatccttattgtatgtgcagcagttatagctgttatcgtagttatagttaagaaaagcatcaaaaaaataacactcaaaaaacagaaaaaagcaaaagaaaacgattatgaagaaaacttcaaatagcgtctctccttcgtttctctcgtaaagcaaagcacttaaaagcggaaaacctctgaatctaatgagattttccgctttttgtttttctcttattctctattcttttttatattttttcccatagcagcaatttcctctgctgtatattcttccactactgtctttgtcacttgttttatatttttttccttcagacgaagatatacaaattccctgaaaatagtgtacagaaccgaaactaatggaatgaaaataagcattcctacgattcccataagattgccaccgatcgtaacagcagcaagcacccagattgatggaagtccaactgatccaccaaccacatgcggataaatcagattgccttcaatctgctgaagaatcaaaaatacaataataaataaaattgcttgcttaggacttatcataaaaatcaaaaagcaacccactgcacatccgataaaagctccaaagatcggaatcaatgcagtaaatgcaattaaagttccgatcaaaagtgcatatggcatttttaaaatactgagtgtaacgacaaacatacttccgagaatcacagcttctacacactgccccgtaagaaaatttgcaaatgtctgataggtcagagaacaaattttcaggaatgcctctgctttttgtttcggaataaatgcgaaaaatacttttcttatctgtacatgcaatttttctttctgaaaaagaatgtagcatgcaaaagaaaatgcaatgaaaaatgtagcaaatccactgacgatagagcccactgccgacattgtcgtattcatcatatttcctgctccgctgccaagaatactgattccccatttaatggcctgatcttgattaaactgaacctgatttacaagcttcataatttcttgattattgtgtgaaaaatctcgaatccagttttgcatctgtggaacaaaattcgcaatacttatcatcaaacttcccattgtccgagtaagctgtggaatcacaccaaacattactagtgcgatcacaccaaccgccaatataattgtgagaagaagactgatcggtcttgctaacttttttcccaccttattttcatcttttgtcttaccgaaaattttcttttctaaaaagctcattggcacattgattacaaaagcaattgcgccaccaagtacaaatggaaacagaattccccatattgttttcagtacatcgatcactacttcaaatttccacaatgcaactacaagcagcactgtaaaaataatcagttctcgaattttcttcatagataacttactcaaatccattatcgttctcctaatttcttaaaatcagccaactatacttttatgcaacaagatatttttcatcatatacttaaaataatattgatgtcaagacgctttatcaattcagcttggcattgtatccgtcttatgataatgttattgatgaacgttatgcaacgaataaatatcagatattgaaaaataaaacctgaaaaaatcgaaataacgaaatttatacgaaaagagaaacaagaaaatgtcacaaaaacaaaacaaattgactcaaaccggtattgtagcacttcttgcttgtgtatgctgtatcctgtggggaagtgcaatcccggtgattaagacagggtatcactttctgcaggtagattcttcagacactgcaagccagattgtatttgccggaatccgctttactttagctgggattctggtattaatttttgcatcgatcagggaaaagaaagtgatgcttcctgatagggcactcctcaaatacgccattcctgtgtgtcttgcccagacagtggggcaatacttctttttttacataggagttgcacacacctccggagtaaagggtggaatcatcaccgggcttggaaattttattgcaattttgttgtcttgtctggtatttcgaaatgaacggatgacgagccaaaaaatcgcaggatgtgtattgggatttgcaggagttgtagtaatcaatctgatgggaaattccctggatatgggatttaaactgatcggagaaggatttattctgattgcacaattatcttatggaatgtctactgtgttgatcaatcttttttccaaaaaagtatcaccagtagtgttaagcggaacccagttcacgatgggcggaattgttctgactttaattggaatgggaatgggcggacgcctgggaaatataactaccggaggtctgtcaattatattttaccttgcactggtttcagcagtggcatatacactctggtctatactgcttgcatggaatgatgtttccaaagttgcgattttcggattcgtaaatccactttgcagcgtgatcttatcggcactgatactcggagaggtaaaacaggcatttaatattggcagcctggttgcattagttttggtatgcgccggtatttatatcgttaatcgcagaaaaaattaagcattgttattttgaataatcccttcataacctgctttaaggaaaagatcaaaacaagtatggaatctgcaccattcttcatcagattttcctaaatgttttctgcacatttccagacatcccattatttgaacggttagtaaatcagttaatgtggattcatctaaacctgtcttatccagcataacatcaagaaaatcctgtttaagtgcaacaactgtatgttttactgccggcaggaacaatgcttctgaaaaaaagaggggctgatatttcggattttcccgtaaaagccaacagagccccttcctaacaattatatttgaacttgatccattctcagataacaaagccatatttttaatatcatatagagcatctgaaaaaacttcttcaacaacttgtccaatgttaccaaaatgagtataaaatgtccctcggctgacacctgcatatttacaaagatctgttatggttatttgcatatagtcctttttcagaagaagctgcagaaatgcatctttaatcgaattatgtataaaattgtctttagataaaattgctttttcttcattcatgtatttccaaaaacctcgctatatataaataattatagtatattttcacataaaaataaagttgtttttcatgaaaacgaggcattttgaacaattgtctcttctttgttcaaacacatctgaaagagattggtttatcgatttgtttatgttatgttgggtatataagaagcgtgtatataaaaatagaaggaggtaggtattctatgggagaaacattatacacaataggaacggatcagcaacaggcgtggatgaaaaaaaactgttttccacctagagggtacggttactctgaaccgggaacatattctctcgatgctacagaagttgcagcatacaatgtcgcgaagtcattttatcaagtctatccggaagtctggaatatcgattatattgaaaaagaaaccggaatcaaacccgatgatatcaaggatcgattaaaacgaatgtatgatgaacatctcatcatgttcgttatgaatccaaatgttggtgtttacggttggggactttattattgggttgtcaaattaaaagacggtacagatccaaaggtaaaagctgaatttgccaagtggtatcagaataaagatgatatttgtacaggatatctcgcagagggcgatttcgatttctttaacggaaatcacatgagagttctggacaatcttcttgcagatgttatccagccatggaaagacagaccggaggttgaatatgtacatctttgtccgatcagggcagatgtcagagaatcacttgtaaatcaatgggatgttccggaagacagatacagaaaatttatttttggggaagaacagaagaagaaattccttaaagttcagaacaaaatagataaaaaagattttgccattattgaagctcttaacagcacaaaatccatcgcagatatgtttgattttgatatgttggagaagttatctggtctggatggcaaacaaatgaaaaaagacattgtaatgtgtgttgatgaacgaaaatttatgctgccaatgatttatattaattacagagcacttggaatatcaatgcatatgtatctggttcgtatgttccagaatgttccgagttacaggaaggcagaaatcgtagatgaattctcacttatgccagaattcgtagatattcttcagttcggtgattctttctacgattgtatgctgactgtttatactgaggtaaatgacgtcgaagcaatcagaagaatgttggaaggatacgctgagattgaagaagtaaaggtagcaaattcaaagagacagttcagacgttgggtagcccgtcttgatgatgataacggatattgggaagaatgcgttatgacggatgactttttacagaacagactggaatccggttccgtaaaatgtcgtttctcaactgactcagaggaggtgcagtaatatgatcgtaaaacatccaagagaatatgttgttgataaacttcagtatgcattaaatccaaaaacgattgccgtagtcggagccagccgttattccacaaaggtcggctataaagttgttgatggccttttaacatggggatataaaggaaagatttatcctgtaaatccaagagcagataaagttgccggatttacagcttataagactgtaaaggatattcctgatgaaatcgatcttgcttttcttgctgtacctgcacacattgttaaatctgttttggaagattgtgttgaaaagaaagttaagattgttgttattgccacaagtgcatttaaagaaatcggacgtggaacactgcaggatgaactcactcaatattgtcgtgatcatgagctgcctctgatcggaccaaaccttgtaggaatgggaagtccataccttaatttcaactgcggatttatcccttatcttccaatcaaaggtcctgtagcaatgatttctcagtcaggtgctaacttgcttgcggcacttggaacctcacagaaagatcattttggaatgagcttcttcgtaggacttggaaataaagctgacgttgatttctgtgagtttatatcctacgctggaagagatgaaaacagtaaatgtcttgcaatttatattgaaggactggatagtcctgatgcatttattgaagcttgccgcagtgttgataaaccgatcgtaaccataaaagtcggtggttcaaagattggtgaaaaagctgcatttgcacatactgcttctgaaaacaaaggaacaaatgatgcattttatgatgatatttttgaaaaggctggagctatccgtgcgaccacatggcaagaattcctcgatatatcaatggcattaggaatgcagccggcaccaaagggtgacaatatcgttatgattaccaacggtggtggttcaggtcttctcagctgtgatcactttgaacgtcggggaatgccaatgcatgagctggcagagatttctcctaatctagcaggaagaatccgtgcatatatgccaatgtttggttcaccgcttaatcctgttgatatttccggaacagcttcacctgttcagtataaaggtgcattcacacaggtaatgcgtgacccgaatgtgcatggaatacttggatccatctgtccgacagcagtaacagatgttccggctgtaacaaatctggttatcgatatttacaagacatataagcatcttggaaaaccgttcattatggaatgccagggtggtgaagaatgtcaggaagctatcatgaagttgagagatcatggaatcccagcttatccgactgctgaacaagccgtaaatgctatggtcgctctctacaaatatggccagattaaaaataagaaataaattatgagcagacatttagattataacagcagttgtgcagacaactacttctcttctataaaaagctcttataagaaaatgacacctcttttagggggtgtcattttcaatagctttattttctttgaattaaaatcttacccgctcccgatccggatgttctcccgaccatccgatctgcggtaaagtcatcaactgatacatatcattttcctctatttcaaatccgaaaacatccagattctgatgcattctctcactggaagaggattttggcaacggtaacacaccgcactgcagagcaaatctgatacagatctgtgcgacagatacctgatatttttctgcaagttccataagaagtggctccttgagaactctggctcgaccgattggactccatgcctctacctgaatccccatctgcttacagaaatcaactgcagccttctgcatatatcctggatggaattctaactgattcaccataggagtaatgcttgtccgctctaacagattgttcaaatgatgtggcagaaaattgctgacaccgattgcccgtacctttttcgacttatagagatcctccaatgccttccatgtctccacatccaaatctctccactctgcattcagatcagaaggtcttggccaatgaatcagatagagatccaagtaatctgtacctaatcttttacaagtgctttcgaactcctgcaaagttgaatcatatccaagatgatctttccatacctttgatgtcaggaaaaaatcttctcgtggaattccactctcgcgtacagcttttcctactgcttcttcattgaaataaaaagctgccgtatcaagatggcgatagccctgtctgattgcttcacttataatcgcttcatcggtgttgtctgcggctttataggtgccaaaccccactgctgggatttccactccattagctaatgtaaatgtatgtctcatatgatgcttctctttcttgttatatagatgctgtggacagtaacaatatgtttcgattcagattataagcaagtttgcttataaaatcaaccatttctttctgtatcttcaataagatttttctttaatgccgcaatcgtatcttggttctttctcaaaagctctaattgcctgtacgctttttctcttaatattttcagcctttcaattttaggcacttcctgtcttatcaaatctgcatttgtatcttccagattgataagcacaaccaattcttctgctgaagcaaaatctctgatattaggagttttcccctttattcctttttcacttctccattgtgctgctgtttttccaaacaaagccatatttaaaatatctgcttctgaagcatatgtatatgccatttcctgcggagataatgtgggagttatcaaaaattcttttactgcatctgtgtggatacgatagtttatttttgaaagttctctctttacatcccatccaatcgctaaccgttctgcttcatctttctttaatcgctgataatctttgatgatataaagcttaaattccggcgaaatccatgaagcaaactcaaaagctatatctgtatgagcataagttccaccatatcgtcccgattttgatacgatacctattgcatctgttgctttgatccactgctgtggtgtcaatgtaaacgcattatcaccagattctgctttaaacctatcgaattcgataggtttaaaattcggattgtgaatttgctcccacaagcccaaaaatgaaatcgtagaatgattacgcatccagtttgccaccacgataaaggcattatctggatttttatattttgcaatatcagtgagcgaaatgtaagcttcttcattaacaacatcgcccatcactctgatttctgttccattggcctctattttcatgtttttcatataattttcattttcctttttagcaataaacccaactctttacttgtatccgataatatcctgagatactttttcaattacttcagggttaattgaagatatctcggctatataaactttgttttttctcggattaaatattccgagtttttcaattttctgaaattctggatgtattgaatgacatcccataatatagtacattaacaactgcaatgtatatttacttcttggttcctcttttgacaccttaaaatcccacaacgtattctcagttaaataatctccatctcctgatgatactatatccgtataaccaccctcaaaagtaaaaccatcttttgtaataggaccatattctttccaaaatgctagacttcgtttaaccataatcacaatattctcaatagtatcactatcaggcttaatttcttctactggtttatacccaattacacccgctctgaaacaaacatcgtaaccaactaatttacatgcattactgacagactcattatcaagaccttttatgccttttaataacttcttagcatttcctaatgccaacccttttttgccacttgcattgtttaaaaataaatcaagacacaatgctccctgtaacgaaattttaaaagcttcttctacggatgttcccatcataaaacgggtcaaatagtcaaccgcaagaccaattaacgaagcatgaatattctctgcttcattcaatgtctttccatcatcaatagtagtaatatcaaattgctttttatttagatatcctccatatggctgttttgccatactaatacgtttagtaacagagtacattgaaatctcctccctcttgcaaaaataattttaaattacaagcatccacctaacgtcaaaattatctgagtgtatttaaatccttcatttaatctactacattccatgacgataaaataatcatcttcattttctgctctcacaacaataccttgcgataaatctgttttccacaaagttttctttccataaaattgatcaacaaagctatttgtgggattaggcatattggcatcaaatccattatgtattaaccattgatggtaatcgtttaacgctggtagcccaacgctttgtattgctgccatgattgctgattgctcacttaattcgcgttcgatattgataacatatctttcttctgcatcaagttcgtatccatgagcctttacaatttctcccatattttcattcaatttaagttttttcactccaatttatcccctttcctatactttacgagatcattttctcaaatatttgcttactgttgcttgagaaattttaagcatatccgctatttgttgttgtttatatccttgctttcttaaagctttaatttgtgatattaacgcttccttacccaaattggtagcaaattgtgttgtcgtttgcactacgccgttcatatgtttggtcaacgttgtagtatactggaaaccatccttatttccaataacactggcaattccagtctttgaatcaaaagtcgtttttacatcatttaaacctgtattagaaacaaaattatttattgcattcaaaatatttttcgattgctttctcatcaaatcattgctcattcttctaccctctttattccgtgttatgttttttataactttataataatttatttggggtaattcttcaagcaaaaaatataaatacgatacatattcctagcagcacttaccaatagattatctctctatccaaaatctcccttgcacacgcctgtatattattcattctgcctacccactaccggacggattcggaactttaacccgttagaaacgtgcgccgctaggcgcacgacgacaaaaagcccttagctatgagttttatacccacagctaagggctttttagataaatatggatttatttgttgcacaaccacctgtcaattattctctaaccctaaaaccactggattacaagaataatggctctcatgcaactgttatcaatttgttatcaaaagacttttaaaagagccgcaaacccgcttgatttactaagcatttttgtttattcaaactccactgttcctgtcggctttggtgtgaaatcataaagtacacggttgattcccggaacttcatgtgtaatacgttctgtaatatgaaccattaattcgtgcggaatctcagcaacagtcgctgtcataacgtcaatagcgcatactgcgcgaacgatacaagaccactcaaaagcacgttttccatccttaattcctgtagatctgaaatccggaacaacagtaaaatactgccagatttttccttcaagtccgttcttttcaaattcctcacgaagaattgcgtcagattcacgtactgcttccaaacgatcacgtgtgatagctcccggacaacgaactccaagtcccggtcctgggaatggctgacggtaaaccataccatgtggaagaccaagttcgtctccaacaactcgaacctcatccttaaacagaattctaactggttctacaagttcaaaattcatatcttctggaagtccacctgcattatgatgcgctttgattccttcttctgactcaagaatatctggccagattgtaccgtcattatgattacacgtcaacacattctgacataatttgatttatttatctttcaaaaatattactctactcttttccttctgcagcgattttctatctatcgcaaaagcgacatggccatcctgcggtaggtgtgacgtttcccccttatcgccacgctataagctgtaatattctccggtaatgccatccccatatatccactatccccaatatgatggatatctgcaccagccatcttacacatgagagcaatctgacgaactgtagcttcatctgcaccttcctgagatgttccaatcgttgtcattgccaacgcacctttttcatgcgcttttcttataagatttcccgcatattccattgtgattcccggaactgttcccggagccggtagcaggatcacatccgcgcctgcatcgacaaacgcctccacatccttttctgtgaggatcttttctcctgcttcagaaataattcctgatgcatgcattttcccggctgtcaaaatcactctgtctccaactgcttcttttaatctggaaagggcctgtataattgcttcattatctacgccaactcccggatttcctgtcagaacaatcatatctacgcccatgtctgcagcttttcttgcattctctaccgtagcctgacggccggttgtcagattccatacagattcttcctgcccatcttttatcacagccggctccagattaatcgcaaccattcttccggtaagacgcttcacctcacgaatcgtatcttctggtgatgtctgcggcagtccctgaattatcggatcgtttacatcaaaaatattcagcatgatcagatctgctcccagagatgctacaaactctgcgttagtgatatttactaacatcggagttactgttcctattgtctctgctgcgagcgttcttccttcactgtctgaaatagcagtcagaagttctgccttattataggaagttaattctctggccgtcgtatctatcagtcgttttaacatcgttttctctcctttttgcagtgttttgttttcatcaaaaagtgtatgatttaagctttttctttgcatcataacattttgtgaaataactgtaaagaaaagtatttgctattgcaaaaactttagcgatttaacgcgaaaaatcactaaattgtattgtcgtatacaaaaacagctgttataatattaaaaatgataatcagataggaatggtgataaaatgagtcagttagaaatattaagagaaagtcttggccagtgtgatgaaatcattctggacgcgctgcttatgcgtaatcgtattgtagaagatatcatggcttataaggaggtcaatgatcttccaatcttacagccggaacaagaagccagacagaaagaatggctggaaaaaagaatggaagagaaacgtcataaagctgaagtagaagatgtatttggaagcatcacaatgaacagtaaaagaatccagtccagaaaattgtttaactataatattgtgcttattggattcatgggaaccggtaaaagtaccatctcagagtttttgaaaaactcctttgcaatggaagtaatcgagatggatcagatcatagctgaaagagaaggtatgactatttccgatatttttgaagtatatggcgaacagtatttccgtaacctggaaaccaaccttcttatcgaaatgcagtccaaaactaatgtcgtgatttcctgcggcggtggaactccaatgagagaatgtaatgtcgttgagatgaagaaaaacggacgtgtagttcttctgactgccaaaccagaaactattctggatcgtgtcaaagacagccatgaccgcccgctgattgaaaataacaaaacagttccgtttattgccgatcttatggagaaacgaagagaaaaatatgaagcagcagcggatattattattgaaacagacggaaaagatgaattgcagatctgcgaagaactaattctcagactacgtcagatggataataaataaaaacagcttatgaagtcgcatctaagattcagacccagaacaggaggaaaaaatggaacagcgaattaaaggaacaacaggtttattagcattgattggaagtccagtaggacattcaggatctcctgatatgtataacttctgcttccgttatcataatttggactacagctacatggcttttgacatcaaggaagatcaggtaccggcagcattggatgcaatgcgtctgttcaaaatgagagggtgcaatgtaactatgccatgtaaaacggcagcagctcagaacatggatgagttatcacctgctgcaagaattatcggtgcagtgaatacaattgttaatgaaaacggaaaactgatcggacacatgacagatggtatcggttttgtggaaaatctaagagaccatggcgtagatgtaaaaggaaagaaactggtgattttaggtgcaggaggagctgcaacagccatccaggtacagtgtgcacttgatggagcaacatccatttccatcttcaatccagacgatccatttcttgatcgcgcaaaaggcacagctgctaaactgaaaaacgaagtaccagattgtaatgttcaggtattctgtctggatgatccgggaaaactgaaagaagaaattgaaaaagcagatattctggtaaacggaacactggtaggtatgaaacctcatgaagatcgttctccaatcacagacaaatctgtatttcgttccgatctgattgtatgtgatgttgtatataatccggaagaaacaaaacttcttcgggaagcaaaagaagccggttgtgcaaaaacgatcggtggaaaaggtatgcttctctggcagggcgttgcggcttataaattatataccggcctggatatgcctgtagaagaatacaagaaatatcaggcagaaaaccaaaaataaaactgctcccagttaagcaaacaataaaaatatcatagaaacatttataaacaaaagtagcggaagtccttgatttttaagggcttccgcactttttgaccatttcttaaaagcagatgtaatatatttcctgcttttctggtgtctttcatcttaaattatcttttatttccctgaaccaggcagatacttcctgctccgccactgagcaacagtagtatcatccagcagaacagttcattactatccgctgttttcggactttttactgaagtttttgttccacttgcctgttcttttttcacctctgttttcgcagcttccggctgttctttcgatggctgctccggtacagacggtgtaacaggcacagatggctgttccggttcgactgtctctttggttgtctgaatcatattctgctttgctgcacttgcagtaactgcatcggaaccctgttcaaagaattgaatcaacagctcttcgcaacaggaatattctccgacctccgctgcatcggcaagctgtggatagctgtcagaaccggcaagataattattaactgctacggtatactcttttgtatcatccaactcctgcccatctttttgcacagaaagcacacgggcacccgccggctgcgccggatcaaaacggacgacaattccaccaacctgcagataacttccgctgtcatttggccacgcatcccattcaccactgtcgtttgcaacaatacagtttttctgaatagtaagactgctctccaacatttcctttatctgtgcaccagtcagcttctttgtcactacatagtttccataaggactgacattgataacatctccatacgttaccgttccggcagcgatagaagcacggattccgccagcattttcaaaggctatatcagcccctgtggcaagcaggtacgcatcagttatgacatttccaagatttgtctgtccgatacgtatatgttcccagaccccgtccaattccaccggtgaagtaccgatgacacgattcagtgctgtctcgttttctgctttgatcgtatccaatacatctgtcacggaagcatccttcggatagttctgtgctgcttcataatcgacagatgttttctcataatccacatgcacacttccatcctcatccataatacaggtcaggtctatcagccccacactatttaaataatgtccactttccgatacataggtttttgaaccgtccggtgtcgtcacggattcactgagttcaatatgctcatgtccacacagccacaaatcgacaccgtccacctgtgcagccacattctttggatcaagcgtatgggacaatgcgatcaccacatcacatccttctgcctttaaagtagcagcttccctctttgcataagctactgcatcctgaaagtccaatccctccacattagatggtgttgtcttatttttcatctccggatcacttacaccaaacacaccgatcttcagtgtttttccattttttgtaatctcttttacaagttcatccgtatcaaaaaaggatgtcccatctgcatttttgatgttaccggataaaattttgacattagcaattccaccaagctcttttaaacgatctttgtcataactccagtcatggtttcctgtggtcattgcatcatatccacaggctttcatcagttttgccaccgattctccctttaccagtgttgcaatcggttgtccatgaaaggtatctccggaatccagcatcagcgaaccgtccgctccttccgtaaatgtctgtgcaattccactcagtcgatccattccgatcacctgattgtaatcatcttcctctacccgtgcatgaatatcattggtatgtacgattttcacatcaaaaattgtacttccagatgcagttccatcctgtgcctgtaccggcattaccccaaataatccgaaaactatcccaaatgtcagcaaaagtaccgttaccttattccattgtttttttaatttcttcatcttactccttcctttaatgaaacggacattcgtaatctacattcactacttgtttatgaaaacagcccattatatggtttgttttcatattgtttccttttattatatgtaaaaagctgtaaaattcaatacttgacatacaacatccacgaacttcaactattgtcctaaaagtacaaattatctttctggaaaataacacagaaaggatggggctgccgcttcacgatttagaaatcgttaaagcggcagccccttacaaatttttatatacacttttattgtcgctctatattttccgctaatgtcatcaacagcttatcaccattccgattaatcatcttcatttatttcgtggttactgagcaatgacctgagtttcgccccgccagattttatatttctaaaaatagtcaggtgaaatagttcaattaaccttttcacctgactatttacatagcaaagagtctatgtacaattacttagtgtaacagcactcattctaccaatatcttttaaaaatctaattcttaataatcaaactgacgataatatctacgaatagaaagtggatgtcttaaaaacagctccatatatgcatctacacgattattaacaccatgcattaccaaatgagaaattgttcctctaaattccggactaattccttttaattcatgttcttttgtatcaataatagtatagtttgcatttacacgtggaagaaattttgcaacacgctcagctaatggtcgttgttcatcctctcccataaacagagtaactggtgtatcttcaacgataatctcctgcattccgtggaaaaattcttgacagctaatagattttgtacggatccacatctgctcctcccaatagcacatagcataggaataggttgccccatactgatttcctgatccaataaagtaatgaggaagatctttatgttctttccaaaatgccaccttattttttgcatactcatatgcccactcatcggaatctttctcaacctgagctaatacatccgcaagattagcttccatctctttattataacggtcataatcatcaaattcaccatttttatacatcaagtaatttgcaaccatataaaatttcaactgctcattcattggataaacaatcagataatcttgcttgtcaggctgtgtgagagtagtacctggattatcgatgaatgaaaatacttttgcacctttttcatgtactctgtccactaattcaaccatttcttttgtatttccagatactgaagatataattactacagatttatttgtaaattttttgtttcctgtagtcaaaaactcagctgcattttcaacaaatactggaagctttgaacggccacgcatatatacttccacctgcatactggaagcataagtacctccaataccaataaaatagattccatcaaatccttcttcccagatttgatcaataattttttcaatctgcggacgaagagcaagtgctccattcacactatcaatctgtgcttgctcgttaaaattacgcaaacaagctccttctgtttctttccacgcttttgcttcatatttcatagttgatatctcctttcactactttctttttaatacaatttcgttgtctgcaaatctaaatttaagaaaaattgtatagcacgttgaatcattttatcccaataaggccactcatgatcccctggtccttccatataaacatgaccataaccattactttcagcaacttttctaaatttctgattattttcatataagaagtcttctgtaccacaaaattgaattaaccttggacgattttcgtctttagcaagtttctctaccaaaaacagtggattttcccactcttctggttttcctgcttctccatgaaaactctgtatttcttgtggcgacatatcttcccaatttccggcaagtaccatctccgtaaatcctacataatcgagtactcctgataaacttgccacagcttcatacttctctggtctattcaatgcaatcttcactgcaccatatccacccatactctctccagctataaatgtattttctcgtctttgatccaaatgaaaccatttcccacaaatagctggaagttcatctgcaacataatggaaataatcaattccaacttttcctgttgtgtaaaaactacgttgaacctcaggcataattattatgaaattatatttttttgcataatattcaattttagaaaatcgcgtccattcatcactatttcctgacagtccatgaagtaaataaagaaccttcggtgttccctcataaagaggtgttacatcattagaaacatctgggaaaataacattaatctgtgttgtcattcttaaatttttggaataaaaatttcctgtaaataatcccattattttaattttaccttttatctgaaaattgtacattaaagttacatttatcaccacgcacataattgcgattgaattcgattgcccttccatccgtatcatacgtaagactttgaaacaacatcacgggtgttcctgcatctattcccaacagttttgcatcattcaaactaggacgaaccaaatccaatgtctgctctgcttccgctaaatgaatcccatacatttcatatacttcatacacagaaaacaccgataaatcaatcccctccattttgggaattaaataatgcggtatatataattcctctaaagaaatcgaatctccgtcagcataacacatgcgcttaatataaaaaataggctcttctggtttaatgccgaacatgtttccatacaaatttcctgccattcttagatacttagacacaattctaaaagatggtttcatattcctatctaccatcgtctgcgtaaagccttctaacttctccatgtttcgttcgattttatgtcctaaaacgtatacttctttatcagaaatatatttcaacaatccttctttgaccaagacttctatggctgttctcacgatttgcttctgaacaccaaacatttcagccaattctgtatcagtaggtatttttgtaccaggatataaatcaccatcttctatttctattcttaaaatctcactcacttgctgagtgatcattcttttacaggcagttttcatatttcggctccttattttttagttaccatgctccaaaatactttaatgtttctgttgcatttgctgcacctttttccattgccccttctatagaaagtccatctacaattcctgttaaaaatccagcaatataactatctccagctcccatactatctacaagatgatcacaaggaacgattccaaaacgatgatatctttcaccatcataacacaaactgccttcttctcccatcatacaaatgacaagcttaggtccctgtttttgaattctttccatttgttctcttacctctttagtatctcctgtatccacagaataaaagagataatctgtatatggtatcgcttttacactttcctctgaatctgggcttgtcgcacaatcaaaggcagtaacaattcctttttctttcaactctttaaactgtccttctactttgccccaaacatcacaaattacaacatcaaaatttttgatataatcaatatcttcatctgttaatttatatttttccaatacgccttcgtcgtaatctccaaatactctttcgccatctatcaattcaacctgggtaacggctgtctttcctttttctacacgcaaatgcgaagtgtcaacgcctttcgctttgatagtttctatcataatctgtccgtagacgtcatcacctactggtccaatatatgcagcctctcctcctaaacggagtgtataaactgccatatttaccgggcctccccccggaaatgcttttccaccatctatattgttataataatcaatacagttacttccaactgccgctaatctcatacgatatcactccttttttatctggtgtctcgccttgttagaacattcgtatattgtacctgatctggtctcgccataatcctaaaaaactcaatacctactcctctatcgtcgtttacaacacctgactgatagtacaagtattgtccttcttctaccttcaacaatttagcttcttcttctgtggcaaatgtaatttctactttctccgtccctttagtcaacaatatgcctaaatcccttagaactttatataaagattcttctgcaaaattgtgagcttccaaaccttcacactgttcgtaattaatgtaactattctcaatcatcaaaggaacattgtttctaatccgcaagcgatataaatgaaatactttatctccctcttttatctgaagttttctcgcaacatatccatcacacgtctcaattctagagattaatacttctgtccaaagaaagtaccctgtttttctcattgcttccgaagtagactgaattccctttatattcctaactaatctcggaggtgccacaaaggttccagatccttttacactatatagttttctttcttcaattagttgttgaatagctgtatggagagtggaacgattcatttgccacattgtacacaactcccgttcgctcggaagctgtgtatgtggttttagttggttttcttgtatataccattgaatctgctccatcgccatatcttgcggacgaattttttttattttctccatacagttctcaccttctcaacatattaagctaatgcttatgcactttcttttttattttttctatcccaataatagaatactggaagtcctgtagctactgccacaaacgcacaaattaagctctgcattggcgcatatgtaagctggccccaaataagtgtacctgtcataataattgcaataagaggcataattggaccacctgggcatttataagatggatcgtatccatgttctttgcctttttttcgaagcacaaagattgtaccgaatgtaagcacattctttaataatgctaccattgtaaagtatcctagcaatgctgacaagtttgaagcaaaaattaatacgattgcaaccgcacactgtacgataattgaaaaataaggagtttcgtattttggatgaacttttgcaaaagatttaaagaataaattatctttcgccatagcatactcgatacgtggctggaacataatacaagatgataatgaaccaattacaacaataattgccataattgcaacaattgtacctgcatactgtccaattcctggaagcttagatgccaacaatgcgattggagcatcagatgtagccatttcatcaatagaaagaattccagaagctacaaatgttaatcctgcataaagagctagtacaataactgctgtaagaataagacccaaaggcatattctttttcggatttttaatttcgcctgacatataacaagcagctcccataccatcatatgaccatgttgttgtagctacacctgcgattagcgcagcaattccacctgttgcatatcctttcaaaggtgcagaagataataaaatatccccctgaagattgaataaaccaataccaataaccaatgcaaatggtaaaattttaagagctgtaataattgtctggaattttccaccgccttctaccgaacgtatatgtactcccatgaaaattaatacaaatactacagcaaccagctttaatgccaaaccatgaatcggaacaaaaaatgcaagataattcacaattgctaaagccatgattgaaattgacggtgggtcagttgcccaaaagctgatccatccacacaagaatgcgagtggtcgagatcctgcttcacggaagtaaacatattgtccaccatcctctggataggcagatgctaattccgaatatacaaagtttgatggaatctgaagcaatccccctataatgtatgctaataccagaaacaagctactaccggcagcatttgctacctcagataaagatgaaaaaataccagagcctactgtagtaccaacgccaagtgcaataacagcgccaagtccaagtttacgagcaagttcgtttttgttttcagacataaaaactctcctttccttttaaacaaagtataattgaaaaatcttgtgcacgacttttctttttttaatttcctattatcttcgatgcttttatattgtaaacagctatctatcttcgctatcacaacttcttaaataatctattactttttatttattcactttcacatttaaacgattcctgcctcggccattagctcacgcatgttatcaatggcacgtttcgcataaaaacgtggttcgttaatataatttgtaaccaattcaagtgttgcagttttatcataacctattcgtttcatttcatatagcatttctttaattggaatatttccctctcctggtatcagatgggtgtctgatccattttctccatcaataatatgcatatgatccatcttatttccgagtttatcaaaatatgccataatactttcatgctgtacaaatggtggaacaatatcacacatgccgactacatatggattatccactcttctaaatagctccaccaaatcatttgctcttgtaaagaaattagattcatacggtgttaaagcttcaactactagcttgatttctagttttgctgcataatctcccaactcttgaatatttttttctaatctgctccacaactgatcatatgtagcaagatatccgccgtttgcaggacttgtaagtacaaattccgcacccatctcttttgccatttcaagagacagtttcagataatcaatagcatctcttctctgagcctctgaaccaatcatataattgtaaggataggcattatgctccggtgtgtaaccaagcaccggcatttcatacttttcaattaatcggcgaacttcattaatatctcccgctttcagatccggtgcatatgcatgtggacgcccaccccaaagctcgatataatcgtaaccgtactctttagcatccataaaacaatgctccaacggattcctctgatatcccgatgtaaacattccaacttttaacattatttcattcctccttgttgtgttttgttggtaaaattatataataattaagcaccattttctattcgcaagaggtctaaaattcaattataaaaaatgtataaaatcccataaccatgttgtttgttatttcaattctataccaattatgttattctgcatattttatcctctttattccccctttattttctcttatttttatgcattatgcatatagtggtatgtttttgatttatatttataccaatttcatcagatacacttattttgttacttattttttagttatccatccaattgccaatgctttgtgcaccatgataacttataagtgttctaataaatagtgtgcaatatctattagaacacttcgatgacttttattcattaaggaacaagcattcagctttgatttttttgttgctggatatctgacctttctaaggttcatctgttatttgatgtcgcctcatttttactcttaatatctttattttcctatatataagttatgtctttacaaatatcattaatcattaggaggtttaaataatatgtctgaatacgcagatcttattttattatcaaactgtatttttacagccacagaggaaatacctttctctggatatattgctatcaaaaacgaccggatactttctatcggaaaaggattggctcctactgaactaataggaacaaacacaaaatatcttgattatgggaacaaaacaattacgcctggattctccgatgtacattgctttttcacaggttattctgtaggatttgttggaatagacttatccgcagctacttctcaagaagatatactgaattcaattaaagagtatgcgaaaggaattcctgcagacaaacctattttgggacatggttggaactccgatacaatccaacctaatggaacagatttgttagatgaggctttttccactcgccctgttcttctgtttgcaaaaggctgcgaaacttgttggatgaatcaagctgctataaatcgttatcagtttaccccggaaacctgttatccggagagttatgttcgctttttaccagacttacttggagataaagactttataattccggaatttaagcgctatattaaaatgatgaacagtaaaggaatcacttccatcaaagaaatgggattcgatgatttctacggatttactgacattctcgcagaactagaatccgaaaacgctttaactatccgcgtaaactttatgagccaacctgttgctgaaccttttaatctctcatatggcaaggaaatgcgtgaaaaatttaaaggagagtttgttcgtttttctggatataaccaaatgaccgacggttctataagcgaactttgcggtgatttgaaaaaaccttattcctgcgcagatacgacctgtgcacaagacattgattgggatcttttagcaaacgatacctttaaagctgatgccgaaggatttcgtttctcattacatgctcaaggagatgctgctatttcaaaagtattagatatttatgactcttgccaaaaagatgaaaatggaaaacttataaatcgtcacagtattaccgatcttgaattcagtgatccaacagacttggagcgtatgggaaaattaggcgtaattgctgaaatataccctcaaattcaatctatcgcaaatcgaaaagacaaacttgccatgattgaagaaaagattggtatggatcgcggacagtattattggaacagacgtaaaatggctgacagcaatgtgttattaagttgcggaactgatcttccacttcttattgatgatatcccagaatctatttatcatgcagtcggaggatacttccctgaaggtggagagccatttaacaaacaaaatatgctgactattcctgagttgctaactgcatggagtgctggcggtgcttataatctatatcaagagaaagagctcggcacactggaaaaaggaaaaaaagctgatattgtcgtattcgacggaaatctatttgaaacagctattgaagaaattcgttctcgcaaagtagaagtaacttttctcaacggacgaatcgtatatagccatgaataaataaaaaaatatctctcttatctaaacagtttatattctctttaagaaaggaagggaaatatttatgaaagagtcttattttatggggattgatactggaacaaactctagtaaaggtgtattaatcaattctcacggagaaattatagcagaacatacaactgaacatgcaatgacaaatcctgccccaggtcactatgaacatgatgccgacaaagattggtggggagatttatgtattataagcaatgcactgattgaaaaatctaaagtttcaccatctgacattaaagcaatcggaacaagtgcacttggtgccgactgcctacctgtcgacgatcagtgtcgacctctacgcaaagctatcctatatggtattgatgcacgtgcaaccgatgagatagaacaactcacagaaatgtatggggaagaacagatccgacagtggtacggacgtccattatgctccagtgatgtaatgcctaagattctttggataaaaaataaagagccagatatatatgcaaaaacccacaagtttctaacaggctctagttttatagcagcaaaacttactggtaattatgtagtcgatcgttttttaggacttgcaagttttaatccactttattttaatgatggaacaccaaatcctgaaacttgcctaccaatttgccgccctgatcagctagcagaagtaaaggaagcaaatgatatcgcaggttatgtaactgaaaccgcttcaaaggaaacgggtcttgcagttggtactccagtcattgtaggaacagatgactccggcgcagaagcaatcagcactggcgttgttgcccctggtaaaatgatgattcaattcggttcttccatttatatgattctcgggacaaaagaattggttgatgatgaacgcttatggcgtgaagaatttattgtaccaggactttgtgatatatctgccggcactaatgctgcaggctctcttactaaatggtatagaaatacaattttcccagatgcactcgagctagagcaaaatggtggtcctgatgcttacatcaccatgatgcaagatttggataaaattcctgttggaagcgatggccttattacactcccttattttgctggtgaaagaactccaataaatgatcctcttgcaaggggaattctatttggattaacgcttgctcacacgcgtcagcatatgtaccgaagtgctttggaatctgttgcatactcagtaaatcagcaattaaagatcatgcttgagcacgatgttcctatagaccagatttttgccgtaggtggtggtgttaaaaatgacttatggatgcaaattgttgcagatgttactggtaaagaaatcagtacccctgccattactgtaggtgcgagttttggcgatgctctaatggctgcatcgggaatcaaatattcaggctttgaatctttcaacaaacttacagatttcattaaacctggaaaaacctatcatcctaataaagaaaaccatgaagcatataaaaaatatcagaatatttatgattctctttatcctgctactgtaaacttaatgcattgtttgtcagactaatctttgtagattagactttataaagactatgtgataattctttcatcaaacaaaaagtacagctgtatgagtttttaataactcttctgctgtactttttaaatctattattttattcatgaagctgaattgtaaatgaagtcctgtcacttctgataaaagagcggctatacgcaatcgctctaccattattgtcccagtaatcacaactcaacataattaatgctactccatttggaatatctaataatttttttatcttactcgttccatctataatctccattgtttgctgcatactggaaatttctattccataaaatgcaaaaatatcttttattgtaaaaactgatgagttcactacttctaacttcggcaaaacatcttttggtacatatatatcttcaattgccaatggctcactatccaaagttatttgatgtcgtacacaaaagattaaatcatctggctcaatattaaaataatttgcatacttatttcctgctggtctatatatttttgcctgctcctttatcgaaactctttttgttcctgaagacattacattaacaaacccaccatgttcatccaggttttcttcgtatttatcaccaacaacaaaaacaccttttccctgaacacgtctcaaaattccttcattaactaatgcatctactgcgttgcgaacagtcaacctattaataccataagtttctgctaatttattttcagacggaattgctgttcctggaaggtactctccctcttctattcgatttctaataatttctctcaattgaagataaattggtgtacgataacttaattttccgtcttcacgctcttcattttcttcggtatagttcaatttattatccataaatctgccctgcttttctcattattcactctctattctgctaacaagcttgaatttatctcctctaattaattgtttataatacataattatcactccttcttcatctttcacaactccagatgtaaaaaacaaaggagaatccggtattatctccaacaacgctgcttcttgttcactggcatatgtaacactaatatgctcctcgcccgaaatctgctttctatgatatacatttttcaaaattcgccccatgctagttttatcagtataatacttttcaaaatctggatatcgttcacaatcaagatatgttgtttccaaaaaacatggaacatcatctatttttctaagaagaatatactcataaacctcttgtccgagcagaacatgaagtttcttagaaatctgtttagttgcttcaacttttcttacagaaataatcttttttgccaaaatagatccctgctgtcgaagttctcctaccattgaatctactccaaccatgtttcgattcttctttcctacagatacataaactcccgctccgttaactctatataacaccccacgaccaacaagtgtatctaccgcctgtctcagtgtcgttctgcttactccccacatttcacacaaatctctctctgatggaattcttgtattcggagccaatctatttactacaataaaatcttccaatttttccacagcctcagttcccggcggtatacgatattccatattcttattctccttaccattgtttacagaccactttcaaatgtaagctaattctatcatctttttcttcgttttccaaccaaaatatataccaaactcaaacgattatgtgtttttaatattcatcaaataatagcaagcttctttttcttctccggtacaagctccaaagcaatatacatcgactaatattatccataatcatgaaaaaccacaccatttttaaatcacgcccaaacataccaatataaatccatgtcaggcctatccttatcccccacattgttaatattgcaaatataaatggcatttttgtatctccaataccatgaaatataccctcatatataattaacgctgcatacataggctcactaatcgctacaattctcagtaatgacactccaagcacaataacctgctcatccttcgtaaagaaacgtataatcacttctgctccgcaaaaaagacctatggccattgctgtcataatagaaacagccacaataagtcctgaacgtacaaccgattctaattctaattcgtctttttttcccacagcatttccagcaagtgtactgactgcagtttgaataccatatcctggcacataaaaagcctgttcaattgtaagtgcaatcgaatgagctgctacacttagtgttccaagtcccgctactaatgctgaaaatacaacatcaccacatcccacaacaattctctctccaattaaaggcaaggaaacattaaaacaattttttaacagttttccttccggtttcaccttcattccttttagtgtcaccaatggattttgcattgcaacccaaaaaatagtaactccacctatcccttgactaattgcagtcgctatagcggcacctcttactcccaatccagctcccggaatactgagcaacattccaaatactgaaatcgtagtatgagagctaattaaaagctgatttaatataatattcaaaaaattcacaccaatatttatataaagaggtgttttcgaatccttgtttgcccttaatacatttccaaatataatcaggcttcctctcaatatcaacggacagtttactataaaaaaatactcacttgcatctctccatatttcctgactagcgcccatccacattggcaacaccggactaattgctaaagcaatcactgtttcaatcacgccaaaaacaaaaataatccaaattgcctgtgctgaagtatgatgagcagcttccaaatctccctgtccagtatattgggcaataaacgaaagcattcccatgctaacagcaaacaaaattccatttaacaaccaatttacagtgcttgtcagaccgacagcagcacttgcaatcgcaccgatctgaccaaccattgcagtgtctacataagctacaatggtttgcagagcctgttccagtattgtcggtgctcctaaatcccacaattcatgcatctttgaattcttcaagattatcctatttttttctttcaaatcaggcatgattgtcgcctccatttcacttgtattagctttcgaattatatatgatgttttattttaccactatttttgtttgttttttttaccacttatctatttcaaattatatcattgaggcatatttatgtcaattatcacaatcgtataaacactgaagaacagtatcttcatttgcataaaaaaaccgcccaaatctctgacttcagtcaatagaatatgagcggtatatattttatttttcttcttggataatcacgttaattgtacgatgtgccggcccatcaaattcacagaaatatatttcttgagcaccacctcttaccatttcaccatctatcactggaaaatggcaatgatttccagtaagcattgctttcaagtgtcctgttggatttcctgctgtactaccataatctcgaagcattcttgcatggctatacggataatcttctggtattaatcgtcccaggaaattctcaatatcactttccagacattctaatgcttcgttcacagttacacctgttgttgtgtgctttgtaagaaccgtaacggttccattctgaactccacttctttttacaatatccaaaactttcggagtaattactgtatattcattatattcttttgttaataatgtaattgattcaacatacatcttctttacgcctttctattaggaattccacctaagaactcaattgcgttttccccacaaattaaatccaaagtactttcacgaaatcccagctctttaattgcatgtgccattctgatttgctcaaatctcggattattgcttccaaacattacctgatgtctcaaactccgatcaatccatgtcatcggaacatctcttgtcaacatctgtgtataaaactccttagcattatcaaaatacaatgcgccagtatctgtatatacattagtatacttcaacatcaacatagctgtctctctacaccatggccatccaaaatgtgcaagacaaatttttaattttggtcttgctgctgccagttcctcaaacatttctgggcgacaatattttgttaatgtatccggttcccatgacattccactatggaaaataattggtttttcatatttttcacaaatatcatacagtggcatcattctttcatccgttggataaaaatgccctttacctggatgtaatttcaaaccacttaattttaattctgcaaatgctttctccaattcttcagccgcatcttctgcaaacggatcaacccccgcaaatccaataaacttatctggtgccatgttaacaagttgactaatttcctcattgcttaccagcacttttccaccttgctgtgtacgataatcttctggaagtaagcataaataatccaagcctgcacatttcatttgattaaaaatatgttccaatggcgccgttccatttttatgaatatctaatgtattatgtcttagttcttccaactctgaatcttgattgattggttcataaaaagctggatgaacatgcatatctataaacatatttctcttcctttctgtattttatcaatatctaatttctttttcccatgctctactctacccatggttcaaatacctgaactaccgaagccgctacttctgcacctttttttaaacattcatctatacttttaccattcaatattccataaagaaatcctgcaatgaaactatctccagctccaactgtattgactacttctgccttttcaataccacctacatagaatctttcaccatcccatgcaagactaccatcttcaccgaatgtgacaacagcaattttcattccacgactcactttatcttttaaaaactcttcaatcttagcatcccttccttcatgataagaataaaatccataagtaacatatggtaaggtttcttctactaacggatgatccagtctatctgcataatcaaaagcaattggaattccttttgctgcaatcttcggtaaggtattctcagcttttccccaaagtgctgtatgaacgagatcatgctctgccgcaaattcaatatcttcttcatcaaaaacaatattctccaatacaccttctacataatcgccatgcacacggtcttttccatccatatccatataagttactgctgtggcaccatcgccaatttttaaatgactaatgtctaccccttctttttttaatgtctctaacatccattttccattttcatcattacctgttgtactgataatcgaaacagggattccaagtttttgaagattcacacctgtatcaacaacattccctgttggatattttttcccaatacgttcataaacatcaatacaattgtctcctatttctgcaactctcattttcattgtcctccttttttacttttttaattctttcattcattgcatttttctacaactacatcatagtcatgatttaacatttttgtaataatctctgctacggcatcttgattgttgttcttctctgttacaaaatctgcttcttttttcacatcatccactgcatttgctacagctattcctaccgctgcatgctgcaacatgtccaaatcattatagtaatttccaacagttataatatcttctttacaaatttcaagcatatctgcaagtaactgtattccattccattttgacacacccttagccataacatcaatgcagttcggctccgaacttacgtagtatacctccggaatacactcatcaatataagcggccacatcggtcatatcctgtgttgccataaatccttccaagccatacttccaatctgtttcttcaagcgaattaattatttcaggaattacaccgacattctttgcatactctagggtttcatctgtcatctttgtaacttgccacgtcataccattataaatttgaagctgtatattctgctcaagacaatgtgtaattagccttttacacacatgtggaggaatcaaatcattatgaagcacttttctatccttacatcgtagtatctttcccccagtgttaagaatctgataatccacaagccattgttcatcctttaatgaccccatatcactatctcttctgccacttacaaatacaattttatgtccctcttgctgtgctagtttaattgcttctttgcttttttcccctaaactagagtcgtcacgtacagcagttccgtctatatccattgctagcagttttcgtctcattttcttttcctttatcttgttacaatgtttctcgatacttgtaaacaacctgcataaattcctttacacggttcacatcaactcgattttcaaagatacctccatacttaaatgtggttcctacaacagccgcatctgccgttgttaattttctttcaatagtatccacacgacatcctgtattacacagcacaactatttcaggattagcctcctttacgcttgcaattaatgtatcatctacatcttgaccagctgcatttgctgaaatacacaatccatctggtgctgctttcgtaattgtactcttagcaatctctgctaatggacgagtatctaaattccgatccgattctgggttaataaaatataacattttcaaatcttctaaagggagtgcggcttttcttcttagtaaactactaaaatcattattataaagtccaccatcacccacatacacaccacaaaatgttccgcgaacaaattgcgcttttaccgcagctgcaagttctaaacatgctcgcccatcactaattgcgtctactccatatggtaccttaatctcagatcgtaaattcccaattacatatgccattgccgcaggagtcaccatatccatatttcgctggtagggcaaactaaattcattgctaaaaataatcccatctacaccaccatcttgtagtgcatgtaagtcttcacgtgcatgttctaccaccttatccatatcattttccgacttgtataatggatctcctggtagtggatcaatgtggagcattgcaataattggtttcttaactccaaacatcttttcagtccataacatctccttcgcctcctaaacaactttgtattttttgatacattcaatatgtataaattatatcacttgtatgaatattgtcaatattctattttaattatcttataaaaaaatatctataatttataaatgtacggtttttagttattttacacaatcttatcatattttttttatttttattgcatacaattccagttcgcggtataattcactcatctagtacatatacatattttatttttttaatacaaattatgttattccacttatttgcgtagctacagaccttggagagggtctataaacactactactttataatataaggaggtctatcttatgagaacacgtgttaactacttcacggaaaattctgtgcgaattcctaaaacggaattctccatgttaggtaatgaaatttttctccttacctaatcgtggcaattcttttaattctattttttactattaaaaacaaacagataaggagatttttattatggatgccgtatatgttgggtggttgtctattcttccgcctatgattgctattattcttgcattaatcacaaaagaggttctattttcacttatagcaggtgttttatctggaaccattatttactctatcgcttctggtatgaatccgattgttggtcccgtttctactgtatttgacgttatgatacaaaaagctgatatgaatattatcattttctgttttttgttgggcggattagtttatctaatcaatgcttctggaggagctcaagcttatggaaaatgggcatcaaaaatcattcgtacaaaacgttcctctctattacttactagtttgcttggttgtttgatttttttagacgattatttcaattgcttgacagtaggaacagttatgaaacctataactgacagacatcatgtcagccgtgcaaaacttgcttacattattgatgcaacagctgcacccgtctgtatcatcgcacctatatcaagttgggcagctgctgtcggtagttatcttaaaaatacaggtgcttttgactctgaatttaaagcctttattacggctattccatacaatttttacgccattcttagccttcttatggtttttctcctctgtgtcttttccttggattttggtcctatggcaaaacaggaggtattagctgaaagaggtttcctcggcggacttgatgaacaaaaagattcattggcacagccaaaatctggacgtgtcgctgatatgattgttccaattcttgtactcattgtaactgcaatccttggcatgctttacaatggtggctactggagcaatgatccttcacttcacactatcaccgctgctctaggaaactgtgttgcagctcaagcccttgtttggggaagttttgctggaattattactgcattttttatgtatataccgagaaaaatcatgacatttaaagaattcatggataactttacaaaaggcatgcaacaaatgattacttccggttgtatacttatgctagcatggacaatcggtggtgtatgtcgcgatttacttagtacacctgtttttgtaaaaacttttatagaaactaccggacttccaggtgctttgcttcctgcacttgtatttatacttgctgcattcttaagttttgccaccggaacttcatggggaacttttggtattttaattcctattataatccctgttgctcaatcaatttgtcctgaattgctactctcttctcttgctgcaacgttagctggaagtgtttttggagatcattgttctccaatatctgatacaactattctctctagtgcgggtgctggtgtaaaccatcttacccatgtttcaacacagatgatttacgctctaacagtcgctggatgtagtttaatcggatatttaattattggtattacaaatggaaacctactactttcacttggaacgtctattttcattctgtgtatttttactttcatcatgcatcgtcgttccaaaacaatattaaacaaaaaagatatttgttcaacacaacaagacccaatgttatcactctaacataaaaagaagtatacattatcgttacgtacatcctttgtttttagttttatattctctaaacaaatttttattttaatatgtactaaataatgaaatataaccattgacatttatacaagttatgatattctattattatagtgtatcttattttaactacttgtatatcaaaaaaattatggaggtgttattatgtcaaatatcacaatggatcaagtagctgttatgggtgtacaatattttcattatacactcgattattatcttaattccatgcatcgttgtggagttaaaaatctcgacttatggggagcatcgccacattattgcagattagattatctcacttcatctgccgccgaacgaaaacttcgtgagatcagaaaaaaagctgaagatttaggacttaaatttgtaatgtatacgccagaaactttagcatatccctacagcttgagtgctcctgaacaacctattcgcgatcgaacaattgattactttgatatggctattgatgatgcacttactttaggaacaactaggttatttatgaattctggttgtggtcctctcgatattcctcgagaagatagttggaagcgtgcagttgaaacaattagtaaagtatgtgaaatggcgcataaacgtggagttacaatcttacttgaacaacttcaaccatacgagagtaatttgttggtcaacttgccacaaatgaaagctatgttggaagaagtcaatagtccagcattaaagacttgtgtcgatttggtcgctatggaagtagcgcatgagaatcttgaagattattacaaggttcttggtgaagatactatacagtttatccattttgcagatggcgatccttccggacattatattctaggggatggtaattatccactaaaagaatacatcaaaattcttgaaaagcataactatacaggtattatcgatttagaaataaacgattcaatatattgggatgatcctcatagctcagtagaaagatctgttgattatctaaagaaaaatatatttaaataactatttacttaatttaaatataagcaaaatgggctgtaaaaaaagaataagtcccgaaaaaagaaagaccaagagttcataatgtggaactcttggtctttctttctgccgccataccaacgcaccttttccggtttgcctgcaatgtgtcctgcaggtcctttccatcacatttctttgcttaagaagattcagaaatcacttatgtatccaggtaaaagagaactcgcttgaaggatttattatatcctatatcggcggtattaattgtaattatcttattattcttttagcttttgttaaacctatctccagaaatctgttttttgactaagcccgatgtctgcgcttttaaaaacagggttaattcttttctttaactatgcttcataatcttggaccgctttaaatgcaagctctgataaaatcaggataaccggaatgttaatgagtgccataaccccatcagtgcatcggaaagatcccacaaaagagacatctccattcctgctcccagaaagattgcaagtgccgataccagtctgaagcctttcataaaagctttttccggctgttttttgtgaatgtagattaaaagattgtcacaataaaaacagtttccgagcagagttgtaaatgcaaaaaataccattgctactgtaatcattttaaataatccagattatgcttcactaaaagcatcaattatcttaacattccacaaatacactccagtaatgttagtgcaaggataatgttaataacacggaaatgccgcagataaaacttctgaatcagtacgcccaagccagtccaagtacaggttgcgatcgttccgatcgttgcaataaccagctcaaaaaacagcaaagccggaaaagaggacatatatcctacaacataacccgttagtgcggtaactccgaacatatagatcttcacattgacaaattgcaacatgaagcctttcagaaacgatgccgattgctctgcgttttctgttgacagcttgctgaaagcaatatgaatcgcaagccacaggatataagctgctccgatatacttcatcacttccattgcatttggaagcaaagaattaaccccatatacgaaaattgcacataagatttgtactacatagtaacctgcaaaaatcccaaagaacagcggctttccttttttatatccatagtttgttacggtatttaatgccagaatatttcccggtcccggagtaaaggcgtttataacgcaataaatcagaaaattgctcagcaccatcttttgtcagagtaattccggttctgctgcggtgaaaaatggtgataccagcctctttttccgtttctttgatggagttggacagacttggctgtgatataaaaagcatttttgccgcttcagtaatagagccaacttctgctaccttcaaaatatattttaattgttgaaccgtcatttctttttcctttttattcttacaaatctcgatttctatgttgcttaaattccaaacaaagaatcagtctatgattgatttataataatttccattttcctccgatgagagatactgctgttgcaactgggcattccggtaattcttcttttgctcgcataattctcacctccaagtctattgtaatacattcaattttgaatgtacagttacaaaaaggtgcgtacttgtttttgcatatgtctcacactatactaataccacgcaaccctgaaactacaaattaactatggaggtattattatggcaaattacacaaaaacaactattggaaaagaaaaccgaattgagctgcatgaaaagttgtctttaacaggtgcagaaatcagtttaaatgaactacctgcaggagcaaatgtcccatttgttcattctcataaagaaaatgaagaaatctatggaattctttcaggtaacggcaaagccataattgatggagaagaaatcagcctttcaactggagactggctaaaaatcgcgcctgctgcaaagcgtcagttttttgcatccgatatttccggaattacttatatctgcattcaggtaaaagaaaattctctggaacattttacagcagaggatgccgtaatcggctaaattaaaagtatttatttacagaaatgcacagctcccgataagctaagaactgtgcatttcttctttcttcaattttacgatttctcaatttttcaaacttgaagttttcaattcttttcaattccatctggcatatgatctttctcagttatcttacgaataacccggcatggatttccagctgccagactataaggtggaatatctcttgttacaacacttcctgcaccaattacacacccttctcctatggtgacaccaccgcaaacaactacattagatgccagccaacaattatcttttatagttattggtttcgcatattcaagattataaaaactaccatcttctctctttcggatattgcgttcttcaggtaataatggatgcataggagttgccaatgtaacatttggaccaatcatcacatgatcgcctatatgtatttcacatacatctaaacatgtaaaattaaaattagcagaactgaattttccaaagaaagtattgcatccgtaatcaaaataaacaggtgcctgcaaatacggaagctcctctgttgttggcagtaattcttgcaatatctgtgcttgctcttctggctgatcttcatctgtcaaattatattttcttgttaatttacgcgcattcaggcgtagttgctccaattctttatctgttggatcgtatctctctccacttagcattttttctctttcagtcatttccaatagcctccaaattttgatttgttactcgcatgatatcgtgttttttcttcaattacagcactttttaacgtaaaaagcgtttttatatgatgcagccaacgacaaggagtcttagtaagtgaaatatcacaacacttctctatgatcctatgtctataactaaaactaatcttgttgtcttatgatttctgatattatcgacagcaacttatcaacctggattggctttgcgatatgaccattttcaatcttatcaaaacagttagaccagtcacatttcacatattcaaatttccatccggtatagcccgccagagcctgcatgagttcgtaaccatatcctcgtcttacaccgtttttatcagcataattgaaggtatcctcaaataaacagcttatcgcccctacaaatgtaaagttatcaattagcgaaatccaacaactcgattaacttatcgagaaatgcctcttccccccatgtattaattttgaaaaatacagcttggcttcctcccgctgtaattgcggaaagttgaactgggtctttgtcattttgaaaaagtgtaatgttaagactcactctgtttcctccggcatagctgtaacgctcaaaaacacgaacgctacaacgcgcagttccactttgaaagtcactggcatcttctaacgttgctgacatactgccatttattattccgttctcaattttggaaagtaactgttcaaaatcttcatttatatatctttctatttttgccatacccaacaccttcctctcaactatctacactgaaatctagagcactatttacttacctgtttttatttcattttaacttagcaaatgttataagtcaatttttaggttattttgaattttctaaaattcttttctctcaccctgtattttaccctttcatcttttgtatatgtaagagggtttgtagattaggatacaaacaactttagatgaatgtttttataaacaatttccttcaaatcaggtccccgtccaacgggtggttcattatttcatccatctcataaattatacttttttcaattaccaaatctcctcctgttgcaaataatttaactttataaaaatcttccggaaaaagtaagtttgacataacaacctctccgttattaataaataattcactctgagaaacatccattagaagttttatcgttaaaaactcctgtgtaaaatctacaggtgctttatattttcctgttgaaattttaattccaaacgtttgcgcatgaatcttttcaatcggataagatatatctagttctagtacttctttcttatcgcacagcgtccactcttcatccgctcccatctttatgttcttcatttcatgcttatttgttcttaaacactccatttctttaacaggtaattgctttaaaatatattttttctcttttgcactaatttcaattcacggacacaagacatctgacccttgaacggacttgttggaagataatctctgtattgccaattatcagcccatgcaatcatcaatcttctgtctttaggtacatgattccacgtaactccagcataaaaatcttttccataatctatccaaagacctttctcttggtttgaatctgctataaatttttgaccagcgaattctcccacaaaatactgcattcctgttccacctgctggagatccatcattaacacttactgttaaaacccatttcctttcttctgttgtctcaactatcattgggaaaagatctggacattctcatacccccgtatgactttcttgatttcctttgaaagaagatatttgattccaatgaattaaatcctttgattcatacaaaagtacacaatctccacctgaaagaatcataacccacttttcttcatagcgaaatacttttggatctcgaaaatcttctcttgaatctgttaaaatcggatttccagaatatttttcccatgtacgccctttatcataactaaacgctactccctgactttgccttttggtttcatgttcactataagtaaaaaatgctaccattcgctgattttcttcatccacaaccgcactaccagaccagatttgtccaattttatctggtgcaatagctttaggtagtctcttccaacgcactaaatctttacttactgcatgtccccaataaatctgctcgttaatattatactgatgaaaaagatgatattcacccttataatataccaatccattcggatcatttataatataatcttctgctgaaaaatgtattttcggtctgtatttttccattttaacacctttaggcattcatccagctccgatgaatgcctgtctttctatcacttcttaaatttatttttttaattcaacaaaatctgctttcaactgatctaccatctgatcaaatgtatattctccactgaaatatccttggaaatctgctgcagcttttggttcataccctgaaggaaatcctcccattacccatggaagtgtcttcccttcatcaatatatctttttacttcttttgacaacgtatctgtgatttcaacatcagtctctgtttcagcagaggtcctgtacctttcggtgatatcattattgcttcgctcttcccgtaggagtcttcgcctgcacgagccggattatctccggtaagcatgttcctcaagatgtatcagctccctcaattgtcaaggtgcaatcggaagaactgtctgaacctcttttacgtttgtgatttttggaaatcagaggattttcaatttgccttccttgtactctgtctgtattgggagccacaaaatcggacatgattttagaacttttttgaaattattttttgaagtgtaaaaagacagaaaaaaagatgccaggatttctcctgacaccgtagtgactgtgccaacttcgtgcccagtgggcacaaggttggttgtattattcttcatttcctaatgatattggttctttctttgttttcttgtttttagatatcatcttatgacctgtataaatagtactggaaatctggaatatccttctttttaatatttttctgaggataaaaaagtaattccacctcttttggtggcatcatctggagttcttcaatcggaattcctcccgcgtgataacgttccataatcaaagataatgttccggatccaatcttataccgatccatgctagaacttcttaatttttatattatattggcttgaatccttttccacgcacttcattcgattccattgtaacaagaaacgctgatgaatctactttctttacagcttcttgaatcgtatacatttctttattgttacatgcacacattaatacttctttttcacgtcctgtataacttccttctgccttaatcaaagttgcccctcgttgtgatagctcatcaatttttgccgcaatttgtggtcccttttctgttacaatcaaagcaagttttccagcatcaatgccatacattagcttatctacgacaaatgatagaatatacgttccaattaatccataaataatcttatcaatgtttccatgcatcagaattccaccaataattacaataataaaatccataacaatgataatttttcctatagaaatatgtggctttgccttgtgtattgccatcaaaacaaaatctgctccacctgtagaggtatctctcatataaattattgcatatccgattcctgagaatacactcatacaaatacaagataacatcatatcaccttggtaaattggaaacaatggaacaacccagtccatcagtatattagaaattaacattgtctttattgatcttaaaaaaaattgttttcccaacaacttgtaacaaattaaaataattggaatattcaaaattgtcgtcattgtaccaattggaattttccaaaaataataaaacacgattgcaatacctgatatacctgctaccggaaatccagatgccactgcaaaattatagactccaatcgcaatgaaacaaccacctacaatatcaagtaaaatatcaattataaatgtctttgcctttgatttcaatgtgagttcctccctattacggaatcttatttcttttgcatcacaatacattgatatgtttgcagtattactgaacctgtaaggatttcatcagtaatcaaatttgtataacattcattcaaaaccatcttcacaggatgtctgttaaaattctgaagaaaatatacatcatctttctgttcttttccacttctttttgaaacagtaactccataaggtaatgtttccgtcaaatttgcttccacatttgcttcctcaattacatcgcccaaaaattctttcaaaaattccagatctggttgaacagcaacatagtaagcttttcctttgccatacgcattttctgtaattgctggagtatttacattgtaatcttgcaagtatgttcccaacggctttgcagtttgaagtgtcacaacttctcttaacacaccggctttatatacaccgtctttataggagaaagtatttggaaaatattcattccccacatcaatctcatcaactgataatcctagcaatctctcatgtggtctctctccaataaaacataaatctgtttcatttactactccactccaataagttgttacatatattccacctgcttccacgtatgcttctactttatgaatatactcttttttatgcaagtataaggtcggagcaaccacaagctgataatctaacaactctcgatccatggaaattatatcaacttcaattcctttttcccaaaaaacccgataatattttaaaagttcttccgtataatcaaattttctcgatattgcttgtgcgtcagaaagagcccaccaattttcccaatccataataatagctaccttcgccctattacatgtacttagtatttgactgcttagcttttctagatctttgccaatccaagcaacttcttgaaaaactctattcttttctgacgcatcatgaccaacaaccgctccatgaaacttttcactcgatcctctgctttttctccattgaaaataaagaacactattcgaacctaacgcaattgcctgcattgaagataagtaattcatccccggtctttttacattattttcctcatcccaattcacaagtgatggtgttgattccatcatcaaaaatggcttcttctgaaatcctctcatctggttatgcataaaggctgcccacacagcaatcggtacttcatcttcttttgtatgccaactcggataagagtcccaagaaatcacatccaactcctctgcccatttatcataattcaatggtgaaaaatacatcatcatgtttgttgtaactggaagatccgaatatgttttaacagctcgaatctcttctctacaaaagtcctgtaactgttcgctcacaaatcttttccagtccaatttcaaaccgtgtaattcatcctctcccctcggagaaggtgaatgaatctgttcccaatcggtataagtatgactccaaaacgcactccaccatgcatgattcaatgcatccaatgttttgtatttttttttcaaccatttccgaaatgctttttgacattcttcgcaatgacaagaagcatccctaaaatttcctccgtattcgtttgatatatgccaaagaattactcctggatgttttccaaagcgttctgataatttcaaatccaactttctagttttttctctcataacagcagacgtgtaacaaaaattatgcctttttcctggtaaattctgtatcccgttttcatctgtctgcattacttcaggatatttttgagtcatccaatttggcattgcacctgttggtgtagctagatttgtatagatgccattgtcatataaacggttaataatttcttctaaatagtcaaactgatattttccttcttctggctctaaaaatgcccacgaaaatattcctagtgaaacattatttacatgcgctaatttcattaaccggatatcctcttcaagaatatccggtctatctaaccattgttcaggattataatctccaccatgcagaagacctggcatatttatttttttatattccatttctaatccctttctttatagatatcatttattattttacagctccagtaataccttctgcaaaactcttctgtaaaataaagaatactaaggcggtaggcaatgtacatattaagactgccaacataagcattccatagtctgttacatatccctctgtcagatttgctacaaccattggcattgtcatgctcttggattctgtcatgattactttcggccacatataactattccaagcattcataaatgtaatagtcatagccgctgcatatgttgatttcattgtaggaataaacatctgaaagaagattctaatttccgaaagtccatctaatctggcagcttcaataatatcaagaggaaatgatcttgcactctgccgaaacatcatgattaaaaatggagttgataccgttggtaaaatgaatcccaacgcactatttaacattttcatttttgcaaccatctgaaacaatgggaccaatgtcgtaataaatggaaccatcattgcaagaagaatcacatccatcacggcatcttttgctttatcatgataaatttcaaatccatatcctgccaaggaacatatcaccatcgaaactattgtaagtaatattgcatatttaaatgaattgaccaatgcagcccctacatcttgatttgccagcagatttttgaagttttctcccaaatgagagccaaacgataatacaccttttgatacatccacacttttgtttgtggatgcacttaccatccagtacaaaggaaatactgaaataaaagtaaccaaaatcaagaatgcatacattcctatatttttcatttttttaatcacgtttatcacccaccctcatttgtataaatgctaatactgcaaccaacagtaatatgaagaaggacatcgctgctgcatatccaaaattcggcacatacttaaaacataaattatatatgtaatgtgacatagagattgaagcattcgcaggacctccatcggtcaagttaactgattcatcaaataactgtaatgttccatttgttgacattattgctgttaacaagatagttggttttaataatggaacagtaatcttaaaaaatgtctgtattgctgatgctccatcaatttttgcagcttcgtatactgaatattcaatgttttgcaatccagaaaggaaaaataccatattatatcctgtccatctccacaaaagacccaataagataaccatttttgccgcaaatggttgtgtcaaaaaattatatggtttatccaaaattccaatattcactagaacataatttactaatccattatttgcaaacaaagaccgaaaaataattgaatacgcaaccaatgaagttgtacacggcacaaaaatcattgttcggaaaaatcctttaaaccgtaagtcttttttatttagaatacaagctaacaccaacgctactacaagcataatgggcacttgaagaatgaaataaaaaaatgtgttttttattgactgaataaatacatcatcttgaaacattctgatgtaatttgtaaatccagccatctgcatatttctacctttccccgtctgaaaagataaaactaacgctttgatcattggccaaaaactaaacaccgcaatcaaaaatgttgctggtgccaaaaaagcccatcctgttaaattatgctttttttccaacgtcatttttcttagtttgttagacacaaaaactcctcctctctatccataagggtgatggttctacattccatccccttgtatgataggaatctctcttactgtcccatattaaaattaacagtatcttccgtttttttaagctctttctctaaatctgcaccatttgtaatatttgttgtcgcaacagagattgcgtctcttgcttcattgaaatatggccccgtaataatagaaggaacttttgttgaatagtcaactattttttcaaacactgcatcaccagagaaaaattcattcggtactgcatatgcatcagaatctcctgctggtgtccatgtagaaattgctccacaagagagaatattatcatataactctgtacttccagcaaatgtagacgcaagaaaatcttctgctaactctacgtttccacaattccctgagattgcccaggaagaacctccattatttgaatagtttgtggcaccctttacatttgtaagttttggaatatttgtaatagcccattttcctgactgatcctcagctgtctgaattgttcccataatccaacacccattaatcacacctgcaacttcactgttcaccattgagccagtgtattcatcccagttatttacttcctgtaacacacctgaatctttcattttacaatatgtatcaattaccttctttaaagtgtcattttttgcaatattcgttgttccatcttcattaaacaaagatgctcctgcagactgtaacatcatcgtaagcaaatcacattcgcctgctgtcgttgtcaataatggttttcctgttttttccagtactactttgcctttttcaatccactcatcccaagtaatatctgtaaaatcttctaaagtcattccagcttcttgcaaaatatctgtacgataacaagcaattgctactccattgtcaaaaggcactccatagtgttttccatctacaacagaaaaatctgttttaccaggagcaaattctgaaaaatcaattttcttttcagaaatttctgtaaatatatctggataagatattacatttttttggaatgactggtcaagcatcaaaaaaacatctggcaatgtgcttagatctcctgatataccagccgtagtaagtctagactgtacatctacatctccaacttcgacaatatcaattttcacatcttgatgatcttcttgataaatttttgcagcttcttccattgcaaaaatattaaatgttttgtcccaacaccatactgtaattgtattatcgtctttattgctttcactttgatttccgcatgctgtaataccaattgccatcgtagctgccaataaaattgccactattttttttctcatttgttatattctccttctaccatgcccctttataccctattgttaccgcactattctgagctcctgcttccatcgaatcttgaacattcaatccattcaaaatcccatataaaaatccggcaataaaactgtcgcctgcacccattgtatcaacaactttacactctatgattccaaatcgataccaagaatttccatcatacccaatgcttccatttttccccaatgttgcaataatgactttaggtcctttttgttgcattgctttcatgaattcctttaattgttccgtacaattttctttttcttttaagcccatgctatgatatttctgtctaaactcattgcgtgattcctcgtcaaaagagaagaatgcatatgtcacatatggaatcgctttctcaacaattggatttgcaaatttattggcaaaatcaaatgcaactggaatttctttcgaaataagtggaagctcatcttcaatcattccccaaattcctgtaaccgctaaatcatgtttctttataaaggaaatgtcttgttctcttagcttaaagtctgccaaaacaccttcttcatattttccaaacactctatctccatctacaatgtcaacatgtgtaactgcggtttttccatccagcacttgaatatgagaagtatcgactcctttattttgaattgcacttatcatgatttttccgaatgaatcagttccaacagcacctgtataagaactttctccacctaatcgttttatgtatacagcaacattcactgggtttccccctggataagattcattcaatgaatcataataatcaatacaattatctcctattgctgctactcttatctttctgtccattttgccaccttaatagtccagacatctgtaatatcttctgatttccataggatgacaattgactttttccatatgtacatcaattctctgtgttaccgcatgcatcactaaatgtgatatatatcctctgtactctggactaattccttttaattcaaatttcttggtatcaataatattgtattttccacaaatgcgtggcaagaagtttgcaacgcgctcgctcaatgatctctgagaatcttccccaataaatactgtaactggtgtatctttgtcaattacttctaacattccatggaaaaattctgcactgtggatagattttgtacgaatccaatgctgttcttcccaataacacattgcataagaatatgtggcaccatactggttcccagccccaacaaaataatgaattttgtcgtccttatgacgatttgcaaattcttctccgaaagcatctgcttccttttcaacttccacaagtgcagttgccaaatactgatccaactccttgtataaatcctcatattctggaaattctcctgcattgtacataaatctatctgctaccatataaaatttcaattgttcattggcaggatatgtaatcacatagtctacaagttttgcaagttctgcagtagcaacatcaataaaaccaatcacccttgctccactcttctgtgctttttttactccatctacgatttcagaagttgttcctgtaacagacgaaataattacaatagttccttctccaacttatttatttccagttgtcaaatactctgctgcgttttcaacaaaaaatgaaagttttgatttttctttcatatgaacctctgcctggaggcaagatgcatatgttccaccgataccgagccaacaaatattcttgtatccttctttacaaatcccatcaatcaattcattaatttgatttctcagagcaagcgctccattcacactttcaatctgtttctgttcattaaatttcaacatagtgttttccctttcccttcttttatattggtgactatttttaaatttaatataccacttttttcatttttttcaatatttcacgcaaagaatattgaatattgttgtatttttataaatataaatgctttttttatacacaatgcatatatttcttttattctggtatgaaacgcatttcaagtttactataccagtttttatatttattttttatttattcatttcttttttcctttccatttgctttttaagaactgacaacgtataatttgattataatttacaagtaaattataatattaggagttcttatgaaaaaaaatttattaactttagatgttgcattatcaaaagaaatcaaatacatgctaaaggaagaacactatcttccaggtgacaaactgccttcggaacgaaagctggcagagctgtttcatgtacaacgcttaactgttcgtggagccttggatctgttacttcaagataaaacaattatctcaaaaccacgaagtggttattacgtagcgcctaaacgcattttacaatccattcgtaatttttccttacattcagaggaagatagcggacaattaacttacgaattatatgatttcaaaaaaatagaagcagataactatcttgcaagcgaaatgttacttcctgaaaaatcgaaaatatacaaaattgtttggctttattcagacgatactcaactaatttgtatcaatacaacttatattcctgaatatatctatccagatctcacccaacaaattgctgcttctgctcctgcaattgatttgattacaaacaattgtcaaataaccttggcaaaatcgaatcaaaaagtcaccttactttacgcagacacaaagactgctcaaattttaaatattcctgttgatagccctttaatgaaatacaaagggctcatgtatgataaacaaggacatcttgcagtcttttttgaaaataatatgctaattgatcgttttggttttatcagggaggtagttttatgagcaatgatgatgtattagccgcacaaataaaatctagtatcattacaaaaattaaaacacaggaatatcttcctggggagttgcttcctagcgaacgggattttgcaacaatgtatagtgtaagtcggtatttgattcatgacatctttgacgaattaattagccaacattacttaattcgcgttcaaggaaagggaacttttgtccgcaaacccgaacaaaatcgagttgctttaggagtactaaatgaatcaaaaaatgccagctttacatctttagttcgtaactttggtattgaaatttccaataaatgcttaggcacaggtataatcaaaaacaaaaaatactttgcagataaacttggactttctgaagaagatgaaatatatggtattcatcgaattcgtcttggaaacaaggaacctcttgcaattgagtttacctatgttcctattcattttttttcagatatcgataattacaattttgagcacatatcgctttatgattatatgaaatccaaaaatcatttgcctgtaaaatttaatgagacaatgatgatggtagaagctggcgaaaaacttcaaaagcaccttcatcttccaagtgccacctctatcgtcaactatattgaattcataggatacgatgaaaatggtaatttagttgaatatacagaaagttattcacgccctgataaacttgaagtgcgctttggcacaaatgatatctaaattaactttaattttaccatttagtatatgtatgcaccataaacaaaacaagatagaatatacacaaaataatcttttgtcaggggcggggaaaattgaccacctaaagccgcttagaattaaccatttttagtcagatagaaaagtcattgtatttttctcttcatgtcctaaaatgatgtatgccaatgcatcagtagaaatcacaatggaagaaaaacacaatgacttaactgaaataatagtctgataaatgacattcactggctcctgcacgttcatatcactgtcgagactttctccctttgacagcttgcatcaaatgtatctttaataacaagaatcgtttccataagattctggttgtgaataactatttttttaaataaaatattttttctacgaattgcacaatactacatggttttaggtggatccttcagttctttgatcggatattttgcaacaatggacaatccttgcattaacatttgaaactgctctggtgtaatttccatagcttcttcttttgtacgcggccagctaaagccaccgatgttcaatcttttataaagaagcaagaatccatcgccttcccaaacgagccctttgattcgatcggtgcgttttccgcagaacaagaataagatatgcttttgaaaaggatccaagtcaaactgaaatttaatagtagatgccaaaccatcaatcccacgccgtaagtctgtataccctgtagcaataaaaattttttcaaatccaacagcatcattaagcatggagaagacctccaaccttgtttagaagttcttccgtagctgtatttgatatttcaattgaaacagcgcctcttcggataacaacatccggtttaaaaggactggtagatgaacttgcttgatcagtcattttgatttcaataaaatctgtagttgttggagttggattctcttgacagcaggcgttaaggtgctctctaatgtagtaaggtatgcttcttctcggagaattcgttgccagtaaaaaaaggatttgtccgaaatgccatgttctcgacaccaggtcgttttaggcattccactagcaagacattctttgatgatacttgtccattgttcacaccggactttatgagttattttattcatgagattatcctccctctaaaaaaccttagattttttaaagtaattatctcatgaaaactagcaaaaatcgtggtacctactatttacctattgagcgtttacgtatttttttctaaatgcaggcaacaaaaaaaacagtctgccttaccaaagaattacaggacttgaacgctgataccatcagaacggacataccaaccagtgttacggttacaaatgtgctggtctggaatgtagaacagtctggaacggacgattttaccgttgcctacgaagtggatcagcaggtaaaagagggagaacagacacaggcagtcacagaaaactataccgtgaccgttcatgtagataaggacggtgcaatggtcattacccagaatcctacccttgctccgtcggtacagaaatcaaagtatgaaccgaaagtacaggaagccgatgtcagtgtcagttccgacacagttaaggacgctaccgctttcttggaaacattctttaagctctatccgacagctacggaaaaggaacttgcctactatgtcaaagacggtgtgattgctcctgtatccggcgactatgtattttcggaactggtaaaccctgtctttaccaaagacggcgacaacctcaaagtcagcgtgtccgtaaagtatctggataacaagtcgaaaataacgcaaatctcacagtatgagcttgtgcttcataaggacgataactggaagattgtagaataaatattacagcagaatagtatggtaattgtttatccaatctatactattctgcttacaattagattgacaaaataagaatccctctcatataattggttgcaatggtattgaggaaatacaaccttaaatgtataatgggaaagtagcattgcaggaatgaggtaggctaatgaataaaatattgattattgaagatgatttagaaataaatgcgttattggctgattttctaaaagaaaaaggatatgctgtgcattgccagtatgatggacttcatgttctggattttttgaataaagaaaaaattgatttgattatacttgatattatgcttccttatcggagtggtgatattattttatctgatgtacgcaagaaatctacgatacctgttattattatttcagcgaaagaaactacacaaaataaaatcgacttgcttcgtctgggagcagacgattatatcacaaaaccttttgatatggaagaagtgcttgccagaattgaaagtaatctgcgaagagtacaatttcaaaataaccagacagaatgtttgcaatataacaatctgactttagacctagagaaaaatacagcatttttgaatggaatagaattatccttaaccgctaaagaatttggcattttagaattgttgatgaaatatccagataaagtattttcaaaatcgaatctttttcaaagtgtttgggatacagaatatattgctgaagataatacacttaatgttcatatcagtaatttacgcagtaaattaaaagcgatatgctctgatacagaatttattgatactgtttggggcattggctaccgcctacataaagctaaggattaaacgttccttagctttattatttttttaacttttctcattacgatttaagaaattctttaaaattgcccgttatactggtttaagtaaaggaggtttgggatatgagttcaattattttagaagcaaagtctttaaccaaagaatataaacaaacattagcattagaccacataaatttacaaataaaaaaagggaaaatttatggatttattggtcaaaacggagcaggtaagactacttttttaagattagtcacagggcttgcgtttccaacaagtggtacactttctttatggggaaattctggaacagaagaattgcagaaacagcgtaaacgaattggaagtatgattgaaacgcctgctctattcccgtcaatgactgcctatcaaaatatggaagtacagcgtattcaacgaggcataccagataaatcagttattaaaaggacattagatatggttggattgcaagatacaggtaaaaagagtgtccgcaatttttcattaggtatgcgtcaacgattggggatagcgattgcacttttaaatacaccagaactattgattttagacgagcctatcaatggtcttgaccctgctggaattgtagaaatcagaaatttattaaaaattttgaataaagaatatggtatgaccattttggtttcaagccatatcttagaagaattgtatcaaacagcatcagaatttattctgattgaccatggaaaaattatagaagagatttctgattatgaattaaatgaacggtgtaaacgacatatagcaattaaaacaacagatgttcagaaaacggttctggttttggaagagaatcttcatacagataactttaaactaatgccagatggcataattcgtttgtatgattatttgaatgatttagagacagttgcgtctgctttggcagaatcgcacattcttgtaacaggactttctgtatctggcgatactttggaggactattttttgagcaaaataggaggaacaaaagatgtcaaatctcctaaaaactgagttatataagttgtttcacagttggtatttttggggaattggaatattcaatctccttttaagtagcatattgctgttagatagtaaagaacgctcttcaaacttaattatggcatcattatacaatattccgttactctattttttgagtatagtgtttatagcattgttcattggaagtgattttagtggaagaactttaaatacttatattactgccggacataaaagaagttctatatttagagtaaagttaattgtatctcaaataggttgtattatcattctggtatttccattatttgtacatggaattattagtcaattttatattggagaaaaacttttttggaatgatagcacatatactatggttttactaactctgtttgccatgataacactgtgtgcattaccgatgttttttgcttttatttttcgtgatatggggaaaacactgacagtttcaatggttttattttttgttatgatttttttactgaacagtgaatctgcacaaataatcagcagaataataccaatgggacaacttaggttaatttcattgcaaaaggtctattcgacaaacttttgcttgtttgtagattttttatggaattttattttatatttcattgcaggtagtgtttttttacatacagacttgaaataaccggaggtgttttttatggataaattattaaaactggaaaaatatcagttgttacataattctatttactggtgtggtatgattggaatatttattttaggattttttacagcagatacttatgttacagaggtcatgggatcgacagaagaaattgcttcttctcttgctgatatttttaatggaatggtgtatgattctacgtttcttcttatcatcatgtcggctatacttgcattgattttaggacaggaattttctaagagaacaataaacttagaggtcagtgctggacattccagaaaacaaatttttacaagtaaaataatatcgtatttaattgcttttaatcttatggctcttgtctatccagtttcagggtgcataagggaatttggacgctttggtgttgcagacgtgggaatgtttttttacaatattataaaagcaatcatttattcttgtctgcttaatagtgcgatatttctaattgcaatacttatttgttgctatttacaggatgctgtaaaagcaacttcggttacagtaattattatttttggtcttagcttatatcttggctatggaatgatgttgagattaccagtcggttttttacctacttatcaaatcagaatcgttgtcagcatgaaaaccttttttcaaccgatagctattttagtaggatgtatatggtctggtatattggtattgctttcgtggataaaatttcgtaaatgtgattttaaataggtggagaaaatgtctaacatagaatggattttaattatcataacaatatttttagtaatactgctatttcgatatattcaattaaaaaaacaaatccgtaatcttgcggatcaagttaatgaattgaattctggaaattcacagcagatgttagacatttcgttgattgataaagatttagaaagactggctggtatattgaatcaatataatatcagacaacgacaggctgttgcaggcgtattacgcaatgaagagtatttaaaagaatctgttgctaatatatcacatgatttgcgtacacctcttacagtcattcttggtcatttacaattattgcaaaaagaaaatttggaatccagtcaagcacagcgtgtaaaagtgatttttagcaaagccgaaaaaatgaaagaattggtagaaacattctatgacctttctattttggaggaacagcagacagttccagaaaaagaaaagtttaatatatctaatatgttaataaatttaattacggaaaatgccgttgcattagaaaaggagaatattttacccgaaataaatctcccagattattcaatatacgtatattctgataaaaatatggtagaacgaattttacaaaatctgttgacaaatgcaattaagtattctgttggaacgataaaaataacacttatggataaagaaaataataatattatatttaccattgaaaatccaatgagtgacagttcagaaattgattgcaatcgactttttgaccgtttttatacaggcgataaatcaagacataatagaagtacaggattgggacttgcggtagtaaaaacacttgttgccattcttggcggaaatattgttgcaaaagtacatgccaatagccttattattactcttgaattataaagtattgaagatatattcgtatgataattcattgaagagtggacatcggcagacatcataagaaaagcaaaaaaacttatgattgaaaaagggcatacttattaccaatcccgtaaattggacagagtacccaaagaagccgtggaagaattattagggattacattatcagacacaaacgattgattgtacttcttgcatatcatgtaaggagtgaaatcatggcaaaagaccctattaagaaagcagataacggaacttattatttcagagctaatttaggctacaatcccattaccggaaaacagatacagaaataccgaagcggattcagaacgaaaaaagaagcaaaggaagaatattcaaaactggtgttagcttctaccgaagaattaacaacaaaaaaagatagcgtttcttttcagcaatttatagaagaaacctacctgccatggtataaaacacaggtaaaagaaagcacttatcttaatcgtgctactaccatcaagaaacatttttcctatttctacaaaatggaaacagacgaaatcgaacctatccatgttcaaaactggcagttgaaacttgcaaaagattttagccttaattacattcgtatcgtacagggaatgctttctatcgcatttgacagagctattgttcttggaattgcgaagaaaaatccttctcgtatgataggcaatatcaaaagcaagaaaaccaaagttgatttctggacattagaagaatttcaaaaggttatttccttactctgtaagaaagactattatgaacattatctgtttatatcgttctggttattatttatgactggtatgcgaattggcgaagcgtcagcattacattggtcagacatagattttgaaacaggcttgcttagcattaccaaaacattatattaccgaacaatgacggactataaattcgttgaaccgaaaacacaggcaagtatccgtactatttatattgattcagatacactcaatgagctaaaggcttggcaaagtgttcagcaacaggttcttcccgattgtccacttgtactaagttataacggaactccaaccagtaaaacaacgcttcccagagctttggaaaagttgtcaaatttagcaggtgttcatcgtattaaaattcatgccttgcgacacccgtatgtcaagcccacgacaaaaaaatttataactttttttgaagtttttcgggcagcctcatagctgcccatagctgtttcaaatgggtgttcacggttatacctccttttcagattcctttgtttctaagaaatcctgtgttgcatattcaatctcaatccgctctcctggaaagacgtaaactttgttgataagccggtcaatcagagcttttgtcagcatattggcgtttccgacttcctgcataatttcctgttgtttcaacttgatttcataatcactttttatctgctttgtctgtgcagtaatgacagcatgaacatttttggcttgtaccagttccgtgtcataaaccgcttttcgtgttcgataggtttccaaatcaatctctccaagcgcatactgctcataaagatgccgcttgctgtcttgaatagaacggagtttttcttcatgttcggcctgctggactgtctgcaaatccaatttatccttattgctgtcaattcccaatgccggacacatttgagcccgaattgtttcaaatacaacctgctccagatcagccatctttatgcgcacaccatgacaaggaagcgtttcagccacctcggaatgacggcaataaaaccacgcaccatttcgtagagacattgcatgatcgcagcatccacagaataccttaccgcggagcagataatcacgcggttttttatttgacagagagaaacgcttaattgaagcattggctttttcaaatagatccacacttataatagccggatgatggttcgggattttgaaccactcactttcatcctttaactgtgtatgtcggctgccaatctctttcacctttctcttgccaattacataggtaccgatatatctttgatcttctaaaatacgcaggaccgttgatgtactccaaacgccgtttgttcgggaaacattgtaatagtccttgcctttaagtttgcgatattccccaggggtggggatattcatggcatacaattttcttgtgatctcggctgcggtgttgccttcagacgcccattgaaatatcatctgcacattcgaggcaacatcctcgtccggttccatacgtccgtctgcactcttgcgatagccgtaaggacagatgacactctgatattccccacgactcatttttgcgtattttgcacttttggttttcatggacatatcccggctataacactcgctgataagatacttgaaagcaatatcaatccctccagtatcacctttgaaattagctgtgtcaaaatcatcactgacggaaataaaacgggtgtggtaaagaggaaatacccgctcaataaaatagccggtttcaatgctgttacgtccaaatcgggaaaggtcttttacaataatacagttgatttttccggcctgaaccattgttaaaagttcctgcaccgccggacgctcaaagtttgtccccgtatgaccattgtcaataaattccaaaatctcactgttatcccattccgacagagacatagctttttcacgaagaatcagtttttgatttggtatgctcaaactttcggttttgaaatcttccacagaaagacggatataaagggcaatcacatagttgtgcacggttccaccgcctttccctgaaattcatttttgaaacggaaggttacatgaatattccgctcgtggtctatctcaattcgttcaatgagccgttcaatcagttccgcagtcagcacatgatcctgtgccagtgtttttgcatccttttccattgcacggtatctggcaagctggttgtccagggagtccatagatttttcaaatacttcaatctcaccagacagagcattgatagcatgttcataatccgctttcaattcaaagtattcgtcatttgtcaaaataccctgtacaaaattttcatataggccacggatcagccggcgtgttttttcaatttcctgccgtttggccgacatctgaattttcagcttatcttttccctgtttttgtcttgcctccaactgaaagagtggcagcgacattcccagcgcaactgtcagctctttttcaagaatagccgtaacagtagaaatcagttctttctcctgtatcatcgcacctttgcagctatctttttctacccggctgtttgtaaggcagtggaaccagtaagtgtcgggtcctttccggcgctcggcgcgttgcctgtgaaggcttctgccacaatcagcacagaacactttacctttgaaaatgtttggtgtgtagggacgttttggagttgctttgctttcttcacagatctgttttctgtattcctgaactgcattaaacaactcatggctgatgatcggttcatgggtgcattttgcaataatcagattatcttctccagccttgacctgctgatgatctacaatctttgtttttccttgcaccagatcgcctgtatagacttcgctttctaaaattttcatcactgtacgggtctgccatttgccgcttccaatcagacccggactggtaatctcgccagtggcctttttataatggctcggtgccggaatccccatctcatttagattgcggacaatccggttcagtgccacatgctcatgtgaccattcaaaaatctgttttaccacaggggcagtattttcatcaatcagaagtttatggcaattatcaggatctttcctgtaaccgtaaggtgcccgtgcaccaatatagtcgccgtctttcatagcctgccgcgcttgtgctttgatttttcgtccaatgtccagagcataggcttcattgatcatatttttcaaaggcagcatgataccgccatgaagatttccggaatccgctgtatcaaactgatccgtaacagcaatgaaacgaacattatgagcatggaaatactgttcgatataataacctgtgtcaatagaatttcgccctaatcgggaaagatccttaacaatcacacagttaatgtggcctgcttcaatatcagatagcatttgctgaaatccagggcggtgaaaatttgtccctgtcgctccgttgtcgatataggtatcatacacaacgaagtccggtttatctgaaagaaagtcattcagtaccagcttttgattttctactgagcagccccgctttttgttatcctccacagaaagacggatatacagagctacatgtacatataaagatggtgccggcataggtgccgccgtctgttttctgctttttcttgccatttagcccaccatcctttcttcattttttgtagcaatctgttccgccaaagagattgctttctgatattcatcctggtaattaaattcaatatgcagttcatctttacccattacccgtatgcttcggataagctgcatgactgcccggcggtcaatatcctccatagtagaaaatctcataaaatggttgatccaacgatttcgttcgcttcggttttccaatacatctgtaagtttatcgttccattcagcgattgccttttggaacagttcaatatctgcattgtattttcgcttataagagagaaattcttcctttgtcagaattccactcaccagattttcatagagttttgccttaaagccctcggtctgtgctacacgcttttcatttactctgatctgtgcggcatattcctgtgccaattcccggttgatccgttcctgactgatactggacagcagggcatccagagaagcaacattttcaatatgtcctttcaaactgtcctgcacacattcaatcagatccgactctttcagcatgaccgacgatgtgcagccattctttttgccggtcgggcagtaataatagtgatactctttgtctttatagcggttcgtcttgcgggtcatacggcagccacagcagccgcagatcaaaataccggaaaaaaggtaaaccttatccgatttgggagaagtccttgtgtcaatcctgcggagccgttgcaccagatcaaaatcgtgcttttgtatgatcgcttcatgggttccctccacacgaatccattccgaagaaggtttgtcctcacgctcttttaatttgaaatggggcgttgtctgcttgccctggaccagtgttccggtgtaagtttcatcctgcaaaatgcggatgattgtagttgcagaccatttgcaatcctttcggtctgtatagccaccttttgcatgaggcattccgtgattgcgcttatacgccaaaggtgaaagaattcctaatcggttcagttcatccgctatatgggaagcgctgaatccctccagccgttttctgaaaatatcccgcacaacattggcagcatattcgtctacttccaggctcttgtgtttatcgccgactttcacataaccatagatggtaaaagcacctacaaaatccccgctgcgccgttttacttccagggcgctccgtgtcttaacagaaatatcccgacagtaagcctcattcataatgtttttgacagaaaccgtgagatcatcggcagcgtcattttccgtgtccacattatcgttaattgcgataaaacgcactccataggctggaaataccctgcgcatataacggcctgtttctatgtactcacgacctaagcgggagaggtctttgacaatcacgcagttagcttcgccttgttcgatcatccgcatcatttcctgaaatgccgggcgatcaaaagctgacgttagataacgatacttttgaaaacactggaaaatcaaggtttttcgagcgacggacaagccgggtattgtactaaaaactgaatacgacgcaaaagcggcgtttcccactctctacacagggagaacaggaacgccgcttttttcatgccctttgttacgcagtaggggcagaaaaagccttgctacaagcggctttccgggcgcgtatctgacgcggcaagggatttataccttatcccccgaaaccgcgcttctactgcgtaacaaatccacagcaaaaggagtgatttactatggcagttttccgggtggaacgaaacaagggctacaccgtaatgagcaaccaccacctacgcaacaaggagctttctctaaaggcaaaggggctgttgtcgcaaatgctgtcactccccgaagattgggactacaccttgaaaggcttatcccttatcaaccgggagaagatagacgctatccgcgaagccatacgggagcttgaacgcgccgggtatatcgtccgttcaagggagcgcgacgagaaaggacgcttgcggggcgcggactatgtgatattcgagcagccgcagccgcctacgccggatttacctacattggaaaatccaacattggataatccaacacagggaaaaccaacattggaaaaacctacgttggaaaatccaacgcaattaaataaagatatacaaagaactgacttaccaaaaaaagaaaaatcaaatacggatttatcaagtacccattccattcctatcctttcccctaacccctcaccttgcgggggagcggctacgccgccggaacggaaaggaacggaagcggcagcacagagcgcagtagagatataccgggaaatcatcaaggacaatatcgactacgacattctcaaacaggacatgaaatttgacggggacaggcttgacgagattgtagacctcatgcttgaaacggtatgcaccgccagaaagcgggtgcggattgcgggggacgactacccggcagagcttgtgaagtcaaagtttatgaaactggacggcgagcatatccgctttgtgcttgactgtatgcgggagaacacaacgaaaatccgcaacatcaagcaatatctgaaagcagcccttttcaatgccccgtccacaatcggcaactattacacttcccttgtcgcccatgacatggcaagcggcgcacttgcgccacaggagccgcacgacccttattcattcaaaccgggcgaaagcctgtaaacaccaaaaggaggattttattatggcacagagaacaggagcattggtatttgacgagcgcaccgaccgttacgacattcgctttgacctcaatacttactatggcgggctgcattgcggggagtgctttgacgtgttcgtgcggggcaagtggaagcctacccggattgagtatggcgacaactggtatcttgtgggtatcagagccgaggatttgaatgggctgcgggtgcgtatctgaccgccgccccataaagaaacgcgaaaggaggacgcgagaaattgcaggacgaagtaaacgaaaagaccatagccctttacatcaagaccgggaagctgaccgcgcagacgctccaaaaggcaatgaaagccattctgtcaaagggcaaaaagcagcttacgaaacagccacagggcaagcagagcttaaagcagcttatgaagcagaacgcgggcgtttccaacattgagattacaaaagacaatatcaaagcctttgagagtacggcgaaaaagtacggtatcgacttcgcgctgaaaaaggacacgacggaaagcccgccccgctatcttgttttcttcaaggggcgggacgcggacgtgctgaccgcagcctttaaggagttttccgcaaagaagctgacacaggacaggaagccctctatccgaaagctgctgacaagccttaaagaagccgcacagggcagaaacgcacagcgagagaaagtaaaaaacaaagacagggggcgggaattatgaagccggaaatcaagaagctgcttatcctcaatctcccctatctgctctttgtctggctctttgataaagtgggcgcggctgtccggctttccctcggcgcggacgcaagcgcaaagctgctacatcttggggacggttttaccgccgccttttccagtatcgcgccgagttttcaccccgtcgatttgcttatcggcattgcaggggcggtcattgtccggctgattatctacgtcaagggcaagaacgcgaagaagtaccggaaaggcatggaatacggctctgcacgttgggggacagccgaggacataaagccgtacacagacccggtatttgagaacaatatccccctcacacagacggaacggctcaccatgaacagccgcccgaagcagccaaagtatgcaaggaacaaaaatatccttgtaatcggcggttccggcagcggcaagacaaggttttttgtcaaaccgtcgctcatgcaaatgcacagcagctatgttgtcacagacccgaaaggcaccgtcttaatcgagtgcgggaagctcttacagcggggcggctatcggataaaagtgctgaatacgattaacttcaagaaatccatgaaatacaatccctttgcctatctgcggagcgaaaaggatattttgaagttagtcaataccattatcgccaacaccaaaggcgacggggagaaatccggcgaggatttttgggtgaaagcggaaaagctctactacaccgcgctaatcggctatatctggtacgaagccccggacgaggaaaagaacttcacgacgctgcttgaaatgataaatgcgtcggaagcccgcgaggacgacgaggacttccagaacccggttgacctcatgtttgaacgtctggaagaaaaagacccggagcatttcgcggtcaagcagtacaaaaaatacaaacttgcggcgggtgatatatgctctaagtgacttcttaatcatgattgtgtcatggttagtgaagcaatcacttagagcatttttgtttcaggaggtacagccatgagaaatgaaaaaattaccccactgtacgagcgcctgagccgggacgatgagttacagggcgagagcaattccatatccaaccaaaaacagatgttagaggattttgcccgccggaatgggctgcccaaccctacgcactttaccgatgatggtatctcaggcacccgttttgaccgccccggatttttggcgatgatggaggaagtggaggcagggcgtgtagaggcaatcgtcatcaaggacatgagccggttaggacgcgactatctgaaggtcggtcaagttatggaggttttgcggcagcgaggcgttcgtctgattgccatcaacgacggtgtggacagtctgaaaggcgatgacgattttaccccgttccgcaacatcatgaatgaattttacgcccgtgataccagccggaaaatccgatctgtgtttaagtcaaaaggcatgagtggcaagcacctgaccggcactgtgatttacggctacttatgggacgaaaaacgggagcattggctggtagatgaggaagctgccgaagtggtacgccgtatattctccctcacgctggagggatatgggccttaccggatcgcctgcaaattatccgcagaccggattgaaattcctgtcgtacaccttgcccgcttcaacgagggtgtgaaccgttcaaagccggtcaaagacccctatggatggggatcatctaccatcgtgaacattttgaaaaaacgagagtatttagggcataccatcaatttcaagacccgcaagcactttaaggacaagaaaagccactatgtttctgaggacgaatggacgatctttgagaatacccatgaagccattatcgaccagcagacctttgatttggcgcagaaaatccgcagcaatgtacggcgttatccaaacggctggggcgaagcggctcccctcacaggcttactctattgtgccgattgcggcggcaagatgtatgtccaccgcaccaacaatggcaagcggatttctcaatatacctgttccaattataccaaagttccgtgtgggacactatgccctacacaacaccgtatcaatgagagtgctgtcctgacattggtttccgacacgctccgggctatcgctgaatattcgagaaatgaccggacggaatttattcacactgttcaggagacgcaggttgctcaacagagtgccgatatatcgaaaaagcgcaggcgtctggctgctgcccaaaagagagccggagaactggaaaaactgatttgcaaaatctatgaggacaatgccctcggcaagctgccggatgcacgatatagggcgcttgatgcacagtatgccaaagagcaggacgcacttgagattgaaattgcggagctggaaaaggctgttaccggctacgagcaaagccagaaatcagcggagaaatttatagccctgattgataagtacgagaattttgacacgctgacaaacaccatgctcaatgagtttgtagagaaaatccttgtccacgaacgcgccagaaaaggtagtcaggacaccacgcaggaaattgaaatctacttcaattttttaggacgctatatcccaccatccttacagccggttcctttaaccccggaggaacaggaagaactgcggaaaaaagaagaacgcaaggacaggcttcatcagaattatttgaagcggaaagccagcggcgcacagaaacagtatgaggacaaaatcaaggcgaagaaaaaagcggaaatggacgctaagaaagccctgatccgggctgaggatatgaaaaaaggtgttttttctactatcggtcagctaccaaaagaagaaccgcgcaaaggcagcatagcagccagcgcagcagtctaatcatcacgaagcaaaggagaatgaatatgagtaagttgacttacattcgttgtggagattatgatataccaaacctaaaactttctgaacagccggaaacttctatcggcaagtacggcagaatgcgaaaatcctacctaaaggaacatcgccccattctctacaaccatctgctgatgagcgagaagctgtatccacacctgttagagattgagcggacagcacaggggcgtgtggaaactatgttgcctcacatgatggagactgcgggtgtcacggaagaactgaaagcctgtgaccccatgcgttgggtggggctgatgaacacattaacggcacagattgaggaaattttaatcagggaactgatttgcagctgaatgggaggtgcgggaaatgctgacctttgaaaagattttgaaagtgtttcaggcatatctggatgatgatcctctgtatgaggtggttcagaccagccacggttatacattgatggcatgggaaccccaccggaatgactggtacagcgctgaaatacagaaaaccccggaggatttacggaacgctttgttgggtacatacgccaactttctggaagataagattaccggaaatgaccgtgacctgactgtgacagaaaccggagaaatccagcagaggtgccgggaacttttggaaaagtgccgggaaacatgatacagaaacgccagaaggaggccgcgattatgcgtcctccttctgcttcgcagtctgttccattttgagcgccccgtctatggcaccttcgataatcggcaggtattcttcagggcaaagcttcagcttgtggctgacccgttgccgctgttcgctttcttctcgtataatctccgggttaaaataccgttccacgggaagtccgcagaccttaatcaactggatcatcacaggcaggctcggaatcgcaccttgattctcaatgttggcaagataccgccattcaatcccaaccatttctgccaatgtttttcgtgccagacgctttgcctctcgtgcagctttgacatctgcaccgaaggtttcaaaaccgggacaatcttcaactttcgccatataacatcacccagttacattgtataattcatacttcgcccgtggaatgttgctatatgcagattggttgaagtttataattcacatttcgttccttgcattgttcgagaaagagaactataatgtactctgtggaggtgcgaaatggactatatgacattgaaagaggccgccgagaagtggggcgtgacacctcgtagggtaaattattattgtgctggtgggcgtatccccggcgctgtgaagatggctggtgtttggctgatcccaaagaacgcagaaaagccgactgatagacgcagaaaggagtttcaacatgaataatgttttaattatcgaagatgataaagaaatttgcgttatgataaaagaccatctggaaaagtacaattatcaagtcttcttcacacttactggtgcaaatgcgattgaacgtataaaagaattatccccggatttaattattttagatttaatgcttccttttatcagtggagatgagttaattagaaatatcagaaaattttcagacgtacctgttattgttgtttctgcaaaaagtttaacattcaacaaagtcgaactgctacgcttgggtgctgatgactatttaacaaagccgtttgatttggacgaattactagcgcgaattgaacgcaatttgctaagaagtcaaaaagatactcccaatctttgtttgacctttggagaactttccattaatacatcttcaaaaatagttactgttgcagacgaaattattgtgcttacagcaaaagagtatcaactcgtagaactactggcgaaatatcctgataaagtcttttctaagcaaaatctttatgaaagtatttggcaagaaccatttgcaagggataatgatgtcattaacacacatataagtaacttacgaaaaaaattaaagggcgaaggctgccgaattaagaccatatggggcttgggttaccgatttgcaaagtgagttttagataatctttagctttacctttagattattcaaggaattgtctgcgatactaaataacaagaaaggagctgtgaaaatatgaacgtaacagtttttgaagctatcaacatcacaaaaaagtatcgcaatacactagccctaaatcaagtatctatgtctgtaatgcaaggagatatttatgggtttatcggagaaaacggtgccggtaaaacaacaatgattcgtttactaaccggactggcggaacctactactggcaaaattgctttattcggtgaaagcaataagaaacttgcaaagcagcgtgagcgcattggctgtattattgagagcccttctctttatcttgatatgacagcctatgaaaatttggaggtacaacgtttgcaacgcggtattccaggaaaaggttgcattgataatgctttagcattagttggtttgaaagataccggaaagaaaaaagcaaaagatttctctttgggtatgcggcagagactagctctcgcaatcgctttgcttgggaatcctgaatttctcgtactagatgaaccaattaacggactagaccctactggaattatcgaattaagaaacttactcaaaagactaaataaagaacgtggaatcactattttgatttcaagtcacattctcacggaacttcatcaattagcaaatagatatggtatcttacatgaggggaaacttttacaggaaattaccgctacagagttagacaaacgctgcaaaaagcatttgttgttgcaagtgaatgatgtagctgctgctagtgttttattggaaagcaaactgaatacttcaaatttttctgttatgccagacaaaagtattcatctatatgattatgttgaaaatgccggaaaagtatcagcgttgctaagtgcaaataatattacgatttatcagttagcacaatctggagatagtcttgaaacttattacactaatttgataggagggtgccaaaatgattaaccattttaaagctgaattttataaattgcgtcactcaaagatattgataactatattaggcgtatgtgcggcggttataatggtctcttttgcacttggtgacatgactttttttggagccggagatggaacagaaagtgtaatcggatttcaagctaagtgttatctatctagtgaaataccaacgtttcaaactgttgcccgctcatctcttgcatatacagcctttttctggattattggcattttatttgcaaccatattttttacaaaagaatataatacgggtacaatcaaattatctgttgcatacggcactaaacgaactattctctactacaccaaagcgattacaatattggtggtgtctctgataacgtatctgatttttgtagctacatttttcgttattgaaatcatacaatccggttacattccaactgcgagtgaagtaataaaccttttgggatgggctcttgcttgcggaacggttttattagcattagaaagcatttctatttttttatgtgtcgttattcaaaatacagggattgtaacagggatttgctgcttatatgtattcagtggagcgtctgtttacttaatgctatggagtgatatggagacggtttcaatacccttaaaattttttgtatatggaaatcctatgtactattggatgaatttcagctcttgtcgcacaatgggtattattgagcatttaccattctatttcatagggtgcatttctcttttgattgttggcggtcttattatgattagaaaagaaatcaagtaaaagggaggtagaatatgggttgggcgattatgtttcttgttctgatagcattggtcattatcctttcaatttctttaattaactggaaaatacagatatataaagtaatcgtccaactaaatgctattctgaatagaaaaacgaaaaagttagttacagtgtctttatctgataggcggttagagcatttggttgaaatcataaatcagattgtatcaaaagataatatttatctgggcgaaattcaaaaaaaggagaatgaattaaaagagaatatttcttgcctttctcatgatttacggacaccactaacttccattcgcggatatttgcaacttctatcaagtgcgcctgatgaaaaaagagcggaatatatttcagcattatccggaaaagcattgagattagaacgtctcatagatgacttttatcaaatctctcttttagaagcaggacaatatccattttactatgaaaaggttgagctatgctcattgcttactgaaatcctgctagacaattattcgattttcagcgttaatggaattgaaccccaaatagaaatacctaatatggacatctatcttaatgctgacagaaaggcgtgtattcgcattatacaaaatcttatattcaatgcggtaacatccactacaaataatgttgtaattcaactaattaatattgcagattctgtacaactctgtattaaaaatcctgttgcatctattcctacagaagaatattcaaaactgttggaacgcttttatgtagcagatgtttcaagaagtaatggtacgtctggacaaggactttacattgtgaaaaagctattacttatgatgaattgtacaaatccaataattgaaatacatgaccataattttatgattacgattgatttttcgcccttactcataaaaaaataatctgccggacgacggcaaaagaaaaaaagccgtcgtaaagcagatctattaacgcgcctatgctatcttccggcggctttgaaaaaacagagccgccgtttctttttgcgaaaagcagaaacccgacgacctaacaccgtgtaaatccacggcggcatataggaggattgccgccgtgtctatgcttgccttttttcacagtacccatgacctgcaccagctaaaaaaagtctgttcccagcagcggagcaatgcggtcagaagtatgcactataccatgtaactaaacagcaaaatatactctattacgctcgtatggctttatgccgtccgggcgcttttttgtccctgtggagccggaacatcgggtcagcatggctcgaactttatccccggtgccgctccccgccgccccattcagatttacccaaaaaatctgaatggaggaaaggcagatggaagttaccatcaattataacggacaagctgtggccgtggaggttacgctggaagtctatgaatttcttgaccgggccgatcataaaacggagaacctgttccatgaacagcggcggcattgggatggccgggagtttgacgagtacatcattaccaccgagggcgtagggggctacggcgaaacgccggaggaatacctttgccgcatggaaacgctgcatgagctgatggctgttctggacacctgtaccgaggcccagcgccgccggttcctgctctatgcgcttgacgggctgagccttgcagagatcggtgtgctgtgcggctgctccaaagtggctgtgtatcaaagtgtggaggcggtcagaaaaaaatttataaatttctttgagaacaggcttaacgaatgacctgttttctggctaccaagtgaaagggattatttcccttatctcagcgaggggcggacagcggacgagctgtccgcctctccgattttcaggaggtaagcctatgaaaacaatcaatctgcggtggatgtatccccactaccggcatgacgagtttgtggatgttacggacgaggtatgggcagcgatgtatcaggccaagcgggagatggagaactatgagcgtcggaaagtctaccaccgcgcctactactctctggacgcatacagctggctggaaaattacgcactggaacacagcagatcgccggaagatattttgctggaacgagaagaaatgaccacccgcctatacctgattgcagctctgccggtggctctggctcatgccactccgacacaggcccgccgtgttcacgcctactacattgccggtatcaagcagccggaaatcgcccggagagagggtatccatagcagtaaggtcagcgttgccatccaccgggggctgcggaatatgcgccgttgctatgatgtcctttttcaaacagagtgagggcgtgcctatgcagaccatcaatctcaaacaatattatccattttgcaaagaggacatttttgtggaggtgtccgatgagatcgtcgaagcgtttcttctggacaagagagccgaggccgccagagatcgcaagatgttccggtataaggcgttttattccctcgattgtaacgatggaatcgaaaatgccgccatcggctgggcgcagccatcgccggaggactacctgatagaaaaagaagaattggccgaatacgaagaactgatacggcgattgtatgaagccatttcctccctgccgcctatgcaggctcgccgtgtccatgcccgctatatgctgggtatgaaagtgaaagatattgccgcaatggagggtatcacgccatcacaggcgggaaaatccatccatgccgcactgcggagactgcgccggtactttgctcgacagaaatggacggtcaatctatgagtatttccaaagaaaagaggtgcctgacatgaacgaaaaaattacagcccacccccaaaaagaagaacgggagaaagtcctgaaggagattcggcagcttgaaaaccgaaagaagattttggagaacaagcagcggaacgaagaacgcagggttcgcacccgccgcctgattgagcgtggagccgttttggaggggattttcccgttggctcccgacctttccggcgcagaggtcaaagcatttctgattaccctgtcccatcttccgggggctgcggaattgactgcaaacctgccaaaatccggggacacgccataagtcccttgtttacaagggcgcacttatacaccgttgccggtgctgtgcgccctgccgggggcgttgcgtacttcgtccgcgatgggaagctacgctccccaaaccccttgtgcgctctgcgcagccagacacccgctttgcgtatgcccggctccacagagcctgttatcccctcactgaaaggaggtgttccccatagatttctgtcatatccccgtcagtattatcaagcgcagcgcaggccgttctgctgttgccgcagctgcttaccgcagcggaaccaagctgacaaatgaatgggatggaatgacccacgactacacccggaaaggcggcattgtccatgcggagatcatgctgcctgccaacgcgccgccggaatttgcagaccgatctatcctctggaacagcgtggagcaaatcgagaaagcaagggacagccagcttgcccgcgagatcgaagcagctctgccccgtgaactgtccggcgaacaacagcttgcccttgtgcgtgcctatgtgaaggacaactttgtagacaaaggaatgtgtgccgactttgctatccatgataagggaaccggcaacccccatgttcatatcatgctgaccgtccggcccctgaaagaaaatggcgcatggggcgcaaagtgccgcaaggcatacgacctggacgaaaacggccagcgtatcccggacgggaaaggcggctggaagaaccaccgggaggacaccaccgactggaacgacaaagggaatgtggagatttggcgggcggcatgggcggcctgcaccaaccgggcgttggaatctgccggcagaccggagcgcattgaccatcgcagctacaggaggcagggcattgataaaatcccctctgtccatctggggccagctgccagccaaatggaaaagcgcggcatccgcaccgacaagggagaagtaaaccggcagatcgccgccgacaacaagctgctgaaagaaatcaaagcccgcattacccgtctttatcgctggtcgaaagccgaaacggaaaaaccacaaacacagcaaagcagcttgaccgccttgtgggaggcccagcagcagttggacgctccccgcacccgcaccggcaaaatccgggctttgcaagaaagcgctgcactattcagctttttgcaggcaaacggcatccagtctatgcagcagcttcatgaaaaaatcactgatatgaacagccgttactatgacctgcgcggaaagatcgtcaaggccgagcgccggatcactacccttaccgagcgcagggagatgtgggaacagtacaaccagtacaagtccatccacaagcagcttgccaaagtaaagccggaaaagcgggaacagtttgagcagcgccacagccgggaactgattctgtatgacgcagcgacccggtatctgaaagacttgaaagacaacggcgaggcaatcaccccgaagacatggcagctggaaattgaccagctggccgctggaaagcagacggacacgcttgccatgaaatccatgcgggaggatttgaaagcagtggaacggctccgcaaaaccgccgagcagctgtccagacaggaacgggacaagtctcacgaccgggagccggagcggtaagggctaccgcgtttcacgacatacttttgcacacagaaaaaccgccgtacaggtttccccatacggcggcagactgtttatttgccgaacaagtcgctgtgtgtgccggtgcgggccagcgtcagcaccagaacatcatcttctatgcggtagacaagcagccagtccgggagaatatgacattctcgatggcctgcccaatcgccggacaaatcgtgatcgcggtttttatccggcagcggttcgcccatcgacagcagcgccacgacctgttccagcaattcgattttcaggccgcgcttgattgcccgcttgtagtcctttttgaaagcggtcgtgtacttgacggtgtactttgttttcctcattttttcaggtcggcaaacaactcgtcaaggtcattgtatccctttacagacgggtcttttgcaatcctttccgcttccagcatggcagcaatcgtttccttgttcggctgttccagccttacttcaaagggaatgccgccttcacgaagcgactggcgcacaaagatgttaaacgccgtagtcaggttcatgccaagctcagtaaacagtgcgtccgcctgcgctttcaaatctgcgtccatgcggatactgatgtttgtggtatttccagccatacgatcaacccctttctgctggcaattatagtatatgccatttgcacgaagaaaacaatactttgcacgaatatttaacaataaattcattcaaggaggttaccggctttatgaaagaaatcatttatgaagaacaataggtctgaacctatcccagtcatggattaccgccagtaccgcagagtgcggaggctggtgcatgagtgctgtaactacatcgacggaaactgtatcgccctggacgatggggagaaatgtgtctgtgtccagtccatttcctattccctgttgtgcaggtggtttcgggcggcggtattgccgcaggataaggaactggaaacggcgctgttccaccggctgaatgctaagaaatgctccgtatgtggggcgctgtttacccccggttccaaccgagccaaatactgcccggaatgtgccgcacgcatgaagcggatcaatgccgcaaagcgcaagcggaaacaacgggagaaatgtcacgctttaggggctgaaaaacctttgtaaatcaaggcttttttcgagggtgtcaaaggcaggctgatagatttatcctctgacccataaaacggccttaaaatgcgtgcagaatcccaagagaaaccccaaggaggaaccctatgtcagacaaccgaaaatattattacctgaaactcaaagaaaactattttgacgatgattccatcgtgctgctggaaagtatgcaggatggtgtgctgtattccaacattctgctcaagctgtatctgaaatcgctgaaacatggcggacggcttcaacttgacgaggacattccttacacggcgcagatgatcgccaccattacccgccagcagatcggcactgtggagagagccttgcagatctttttgaagctgggtcttgtggaggtgctggacagcggcacattctacatgagcaacatcgaacttttaatcggccagtcctctaccgaggccgagcgaaagcgtgcggcgaggctccaaaacaaggctctttccgcgccccggacaaacggcggacatttgtccgacattcgtccaccagagatagagatagagttagagaaagagatagagataaagagagagatagagaagggacgctccgcccgcgcctatggccgttaccagaatgttttcctgacggacgaggaactggcagacttgcaggccagttttcccactgtatggggccagtacatcgaaaagctgtccgaatacatggcctctaccggtaagcggtatcagagccatgccgccaccatccggcgctgggccggtgaggacgcgaaaaaggcggccccgcccacccgcaaccgtgattacagcgtaaaggaggatgaaaccgtatgatggagattaccgcagaaatccgggcgctgatcgacaaggcagccgccggtatggaactggccggggacgagtacatagacccggcagacggcctcattcactgtaaaaagtgcggcggccagaggcagaccgttgtgccatgctttgggaaacccggctacttcatgccccgctgtatctgccagtgtcagcgggaggccgaggaacagcgcaaggccgccgaggaacggcagcgccgcatggagcgcatcaagcgccggaaggcccagggcctgcaagaccgctatctgtacgactacacctttgccaacgacaacggccaaaatcctctgatggacaaggcccgcgcctacgtggagaactggaaggaggcatacaggaacaacaccggcctgcttctgtttggggatgtgggaactggcaagtcctttttcgccggttgtatcgccaatgccctgcttgaccgggatgtgccggtgctgatgacgaactttcccaccatcctgaaccgtctgacgggaatgttttccgaggacagggccgactttatcgccagctttgacgagtacgacctgcttatcattgacgatttgggtgtggagcgcagtaccgagtatgcgatggagcagatgtttttcgtcatcgacagccgctaccgcagccgcaggcccatgattatcacaacaaacttgaaactgtccgagctgaaaaacccgcctgatctggcccacgcccgtatctatgaccgtattctggaacggtgtgcgccgattctttttgacgggaagaatttcagggaagaaaatgccggtgctacccgacaggcagcaaaagacattgtaaacagtaagcaagactgattttttactgggcggcacagacccgcccggagaaaggagcgccatgaacaaagaaccccgtactatgcaggtggcagacgccgctactgcgtccagagcgccggaaaacacgccggcgatggtaaagaaaatcggcaagacgacctacaaggttcatgtccatttcagcaataccagcacagaaaccatgagcgataaaatcaagcgtatgctcaaaaatgaaattcagcagatgtgacagactgataaacgaagccgccttgtgctaaactgatgatggtacgcaccaaaatttttgtcaaggaggacacgaaaatgctttacacagaaaaagagaaacatgaaattgagcgagtaaaggaagtctttgcggaacatctgcggcaaagccctgattttgaactgctctggtcggacaaggtgggctatgtctggctgacgattggcgtaaatcctgtctatgtggataccggtatcaggatagaatctgccgctgatctctgctgcaagtgtttggatgatgttgctatggatgttttgtatatgacgggcaacgatcatgcactggaggaagccgatccgctggaattggccgaaatcaagcggcgctgggagccatatatcaaccagctgccagactatgcgtatctctgcaaagacctgctggacggaaaaatgtaagctgttaaacgaggtgtcaggagccatacggtgcttctggcaccttttttgtgaatttgattaaaaagtccttgacaatttgtctctggaaaaacagcaaagtcgatccttatttcctgtgcttccagactggctccttttgacattaaagaagtcagggaaattaccatgtatgacgaactggatctggatatgctgggggatgaacggactgctcttttccttattatgagtgatacggacgggacctttgcatttttgatcagtctgatctattccattttgtttaaccgcttgtgcgaacgggcagatgatatatatggcggaaggcttcccatccatgtacgctgcctgatcgacgaggcggcaaatatcgggcagatcccgaacctggagcgtcttatggcgaccatccgaagccgtgagatctctgcctgcctggtgctgcaggcgcaaagccagctcaaagccctgtataaagacaacatggacaccgtcatcggtaactgtgacgcctctcttttcttaggaggcaaagaagaaaccaccttaaaaagctggaactccctattggggaaagagaccatcgacctgtataacaccagtgtcacaaagggcaatcaggaatcccacggacaaaattttcaaaagctgggaaaggatctgatgtcggtggatgaactggcagttatggacgggggcaaatgtctgctgcagatcaggggtgtgcggccgttcctctcccggaaatacgatataaccaaacacccaaattacaaactgctttccgattttaatgagaagaacgcttttaatatcgaaaagtttctttctacccggatgccgatgcgtcccggtgaacgataccgcaattatgaagtcacagccgaagatctggcttcccagactttatagagttgttcctgcctgtcaaagcatgatgccccggcaggctttgtttttgtcacgatgaaaggaggattttttgaggattcgtgattctccctgaaaagtaaataaccgcaggattcttcctgccccatgccgccgtgctgtttgaaacagatttttttctaaaaacagtgcggcggctttttttgtttccggcctgatacggccatatcacaaattaaaatttctgaaattaaaggaggaactacatggcattttttgcaagcgcgattgatactttgaagatccttgtgatcgccctgggcgcaggtctgggcgcatggggtgttgtaaaccttctcgaaggttacggaaatgataacccaggtgcaaaatcccagggaatcaagcagttcatggctaattaaagggaacaaaaagaaagggaatgcacaatccagacggtatcagcggcaggctacaagaataaattgtgatttcacaagattggtgttataataagagaaaagttcctgccggggcaaccgccccggtggtatggatagaaaggcaggaaaacaatatgcacatcagctataaaccactctggcacacactgttagagcgtgatatgagaaaagaggatttaaggcttgctgctggtatgacaacaaatatgattgccaacatgagcaaagagggaaagcacatcagcatggatacattagcccgtatctgtgaaactctgaattgtgagattactgatgtgattgagttagtaccagacgagcctgcttccacaggaggtaaggaacatgagcgaattgaaaccaagaataacggaaaacggaattgattatatccttgtcggagattactacattccaggcttgaaactgccggaggaacaccgccctatcggaaagtacggacgaatgcaccgggaatatttaagagaagtccacccagccagattgaatacattgatactgaccggagaattgttgacatatcttgcagacctgaatgaacaggcacaaaaacggttagacactatcatggagcagatgaaagctaccgagggcgtgacagaggaattgaagtgtacccgacaaatggaatgggtgcagcgttgcaataacattcacaacagggcagaagaaattgttttgtatgagatgatttattcataacgggagcaattaaatcggaggtatataagatgattgaaattgtatttggtgaaagtgcctgtggaagtttgaaaattgcccaaacttacggcaagggaaagtatagaggaagtgctgtttcaatatttatgaggcacgaagacgggagtgttccatcttcagatgaaatgaaaaaggcacagcttcaagcacaggaacaagaacgcattgcttgggagaatgctattccattgggaggcaagagcagtgatgtttattgttttgatatggctcttagtgtgggagatatttctgataatggaattggcgaacagcggaaaaatattttcaagaaaatgctgtctgtctgctttgtagaggatttagattatcaggttgaagaaaaaatacagaaaattaaaactacattgacctcagtgattgaacgatatgtagctggggaagaaattcgcatttggtatagctataatccagatgagctttgtggtatgtattggcttatgaaacaacttcaaccattaaactgccagacaacaatttatttggttaagttacctacatgggaatatggaaaagaaaatactatgacatccaaaatagcatggggcgaggtctctcctggcgaatggggaaactatataactctacaagagaaagctaatcctgtatttctttcagcttgtactatgaaatggaatcaacttcaaaatgaaaatgcacctttgcgtgcaatgttaaatggtaaattgcaaagcgtttcagaagatatatatgatagtttcattcttcgtgaaattgcggaacagccagagcaattcaaaatggctattgtcataggtaatgttttaggaaaatatcaacttggaattagtgatgtatggatttccaatcgcattgataaaatgcttgaagatggtgtgttggaaattatacaggacgcaccaaagggagaaacaaattatcgccgaatattaagaaaacgaatgaaataataaccacagcacaaaccgctgctacatggaatccaacaaaccatgcaacagcggttttcctttaccgttttttcctctggctgataggcgttcccattttctttgattttttgagaatacgaatgaaccagcgaaattcttcttctgacaggtttttatagttgataccaagctgcttgcagtaaaggataaccagtttttcatctcgactgcccttgaaattttcgaccgcttccagattttctttcagttcatcggcaacggtagtttggggcgcactctcgctgtcctttttgtggaattcccgaatatcccggataatcaggttgaggtcatccagaaccatgtgactgaaatactcatcatcactgatatgtgcggcttgcagcaccttcaaatgcgggtcatcttcgccggggcgataccgttcaataatttcatgccggacggtatcaacaagggagttgagattttggatttgcatggtggcaatcccgtccacataaatctcaatgtccgcaagaaacttgataaagtccttatgggtggcaagttcgcagagcagacggttgttaatccgaccgcttttcagcagtgccaccatctcatcgttcaaatgcagctccgtcagtggcgtgttgatctgctccctgttctctgtccggcacagcagataatcgacggaaaccccatagaagtctgccagcgtgataaggttgccatgattgatttccttataatcctctttttcataactgccaagggctgatttagaaatgcccgtcagctttgatagttcttccagatttaagcctttgtctttgcggagttcccaaaggcgttcctgtatgcttgttgcaactttcatgggcgcacgctcctttccggtggttttatttctgccgtttaactggattatatcacactttccgcaatcgtggaaatttctgattttccccctgattcctactttgtggatatacggcacagggcacaaaaatgttctatgatacaggtagttcatcgatggattattccaatcgaatgaccagcctgtgtgggatatgcttccccggcgatgtagcgccatgacttttggcagggatatggaggaaccctgaccgaaacgagcgtaccaaagggagcgatacgccgctgtgagattcaggggaggaacgacaccggggagaactggcgaactgacaccgaaatgataccgaaacacgacaatttgatagggagatagtctaccctatcgctgagacttcgggagattttaagcggctctatggctgtaattttgccgaaaatcgccccgaaaccatacacgaaaacgggaggaaacgtaacatgccgagaatgagcaaaaagcggaagcatgagctttccttttacctcaatgaccgggggcgtgtcacttacaacgaattatgccggaaatgccagcatgggtgcaagcagagcttccgggcggttgtgattgactgcccccgttatttatccaaacgagcaaagaaaaaggaggaacacaccgaatgaattttgaatttatgacgatagacacaccattgccgccctgtatgccatttcccagagcgttgacaggatttccagtcagcagcaccgcaaaggtcatgtactgccggatgttggacgctatgcttttcagagggcaggcggacgagaacgggattctttttgtctgcttccctatcacagccattgccgcagtcctgtcccgcagcctcatgacggtcaagcgttctttgaatgaactggaaaccgccggacttatcatgcgggtgcgtcagggcgtgggagaaccgaacaggatttatgtgctgataccgggaaaggagggcgctacccttgcctgatacctcaaagctgggaaagctcaaccgggagttggagaaaagcgaaaagaaactgcggaaagccatcaatgatgaaaaggcattgcagcaccagttgaagcagcttacccgaaaggaacggacgcaccggctctgtactcgtggcggtatgctggaaagttttctgcaagagccggaacgcctgacggacgatgatgtcatgctgttgctgaaactcatttttcacaggcaggacacgcaagatatattgaaaaaactgctggaacgggagaagccggaaaccccttagtttactaagggcgcaattatacaccacccagaggttggtgcattgcgttctccgaaggctccttgcaggagggctgtgattttccgcagccacggtctgctccaaatcaaacaggggacgctacacttcccctgcgctggctgccgccagctacccttttgtggacttgccatctggggacaccttgcgttgcaagctgttcccagccgataagtttcataaaatataatgcaaatggaaagctaacttgacataaaagaactatgtgatataatggaagcatggaaagttaactttccataagagaggaggatgacatgaaaaatcgcctggaagaattacgaaagcaacgaggcataaagcaagaagatttagcaaatgcattggaagtatcacgacagaccatcggctctttggaaaacggacgctataacccatctattcagttggcatttaagattgccagatatttcaacatgagtattgaagaaatttttatttacgaggaggattgattatgaaaaaaaggttgttgattttaatgacagttacaggaatgattattctactgggaggattgctaacatacggtttgggagtacatgaaataatacctgtgccacgtcccgacttaatagtagtaggtacatctctcattggaattttgctgattgtatctggtgtgtgcgacttgttcgttaagaaaaccaaagaaatggaaatagaggaaaatgacgagagaaatatttcgcttagtaatgctgctatggcaagtggcttcaaggtaatgaatgttacgattgctgtttctatttttgctttgattttcaccggatatatgacagtagtcccatgtttcactattattggggcttatgctattggacaaattgtatttattgtgcgactttggtacttgcacaaaactatgtaaatgtattactaaatacccgccgcccccagcggcacaacaagcaggaaatctgaaaaggtatcctgctttttctatgtccaaaaacggaaaggaggaacacaaaatgccctgtccacacaacgaaatctctattgtgcagcgcagccaacagcagtctgcgattgccgccgctgcttaccagagtggcgaaaaactgttctgtgaatacgaccagcaagtgaagcactatccggaaaagcgtggtatcgtccacaatgaaatcctgctcccggcaaatgccccacagaaatatgcagaccgcaataccctatggaacgccgccgaagcggtggagaagcaatggaactcccagcttgcaaggcggtgggtgcttaccatccccagagagataccgcctgaccagtacgctgtccttgtacgggagttttgtgagcagcagtttgtttccaaaggcatgattgctgattttgcaatccatgacccccatccgccgggacacaatccccacgcccatatcatgctcactatgagggcaatggacgaacatggaaaatggcttcccaagagccgcaaggtttatgaccttgacgaaaacggggaacggataaaacttccgtccggcagatggaaaagccacaaggaggatacggtggattggaacgaccagaagtattgcgaaatctggcggcatgaatgggaggtcatccagaaccgctatctggaagccaatgaccgtccggagcgtgtggacttgcgttcctatgccagacaggggcttgatattgtccccactgtccatgagggggctgctgtccggcagatggaaaagcgtggtatccagacgaatatcggaaacctgaaccgggaaatcagagccgccaacagtctgatgaagtccatccggcagcttatccaaaacctcaaaggctggattaccgagctgggagaaaaacggaaagagctgcttgcacaaaaagcggcggaggaagcgacacttcttcccaatctgctgatgaagtacatggagatacgaaaggaagaacggaaggactggacgagggctggacagaaccgggggacttcacaggacttaaaggcagtcagcgaagccctgtcctatctccggcaaaagggactttccactgtggaggacttagaagcgtttctggaatcttccgggaaatcagccgcagattaccgcaatcagatgaagccaaaggaagcccgcagcaaagtgattgacgggattcttgccagccggacagactgcaaggaatgtaagcctgtctatgagaagtaccagaagatatttttcaagaaaacaaaggagaaattcaaacaggaacacccggaggttgcccggtatgcgaaagccgcctcctaccttgccaagcacccggacgataaggacagtacccaaaaggagctgcaagaggagcaggaaacgcttctggaagaaattgcagccctgaaaacaccgctgaccgaggtacaggaggatttgaagaagctgcgggacattcgctactgggtacggaaagccacccccggcacagaagaaagcaaagagccgcccaagaaacagcctatcaaagaagtcttgcaggataaggctgacgagaaaaaagcacaaagaactgtcccggcgcagacgaaacacaaacaacaggatatggaactttaacaggcacttgccattttcagattgagaatgataagtgccttttcttttttacaaggaggaattgatttgaatgtatttgaagctgtgaagcagtccgttacgacaagacaggctgcggagcattacggaatccgggtaaacagaaacgggatggcttgctgcccgttccacaacgataagacccccagcatgaagctggacaagcgtttccactgcttcggatgtggtgcagatggggatgtgattgattttgccgccgccctgtatgggctgggaaagaaggaagccgccgcacagttggcgagtgacttcgggcttgcctatgaggactggaagccaccgggcagggcaaggaagcccaagccccggcagaaatccccggaagaacagttccgggaagcaaaggcacattgcttccgtgtccttgccgattatctacacctcttacgggtatggaaaaccgactatgccccgcactccccggaggaagcgtttcatccccggtttgtggaagccttacagaagcaagaccaagtggaatatctgctggatgtgctgctgttcggggagacagaggaaaaagcggctttgattacggactacggaaaggatgtgatacagcttgaacagcgaatggcagagcttgcagccgcagacgcagcaagaactaaaaaacaccatgaacgccatgcagccgccccagagcgttgaggaagtaaaggcaactctggaaaccaccgagaaaggcggtgtccgccagagcatacggaactgcctgaccgtattccagcgtgacccggtgcttgccggggcaatcgcctataacatcctgaccgaccgaaaggacatcataaagcccatcggttttcacagagaaagcacagccctgaccgatacagacatgaagtatctgcttctttatctggaagaaacctacgggcttaccaatgagaaaaagattgataacgccatcgggattgtggcgaatgaaaacaagtaccaccccatccgggattatttaagttcccttgtgtgggacgggacagagcgaatccgtttctgtctgcggcactttctgggggcggatgtggacgattacacctatgaagccctaaagctgtttcttttgggggcgattacaagggcatttaagcccggaagcaagtttgaaatcatgctgtgtctggtaggcggtcagggggctggcaagtccaccttcttccgtctgctggcagtccgggacgagtggttttccgatgatttgcggaagctggacgatgataacgtgtaccgcaagctgcaaggtcactggataattgaaatgtcggaaatgatggcaaccgccaatgccaagagcattgaggaaatcaagtcttttctaagccgacagaaagaggtttataagataccctatgaaacccacccggcagaccgtccccgtcagtgcgtgttcggcggtacttccaacgcccttgactttctcccccttgaccgttccggcaaccgccgatttatcccggtcatggtgtacccggagcaagccgaggttcacattttggaggacgaagccgcttccagagcctatatcagccagatgtgggcggaagcaatggagatttaccgaagcggcaggtacaagctgtcattcagcccagccatgcagcggtatctcaaagaacaccagcgggattttatgccagaggacaccaaagccgggatgatacaggcgtatcttgataagtacaccgggaacatggtctgctccaagcagctctataaggaagccttgaaccatgcttttgacgagccgaagcaatgggaaatccgggaaatcaacgagattatgaaccagtgcattgaccgctggcggtacttcccaaacccaagaatgttttcagaatatggcagacaaaagggctgggagcgtgaaaacccggcaacggactccggcaacccgtctgaaaaaatgatggacggttttgtggaggtcacagaacagatggagcttccattctgaaaatgacagcccgttgcaccccctgttgctatcccgttgccgagccggttgccggggaaaaacccttatttccgggcttttctcccttataacaaccaaaacaacagaaaaataaaagaaaagtataaatagtaaccatcgccagattgagattgtttgcaaggtcttttgaagcccgttgccggacttcgttgccgataccctctgtctggctattttcatgtatggaggataactgcctatggcaaaaaacaaaacagagattcatgtgaccactgtatttgacggggagctggacgccactgatgtgttcgtcagcctgatttcccagaaatacggaaagacaaatacgaaagaatatcttgctaaaaagaaagatttgaagtataatgaagatgaggttcaaaagagccagataccgtctggattgtgtgggtaaatggctatgatgaacgaaatggaatacagaacaatcggaaaggcatttgccgggggctatcgtgcggcggtctattgcaggctgtcaaaggacgatgacctgcaaggcgaaagtgccagtatcgcaaaccagcgtgatatgctggaaaaatactgcgaaaagcagggatgggaggttgtggcagtctatcaggacgatggcttcacaggtcttaatatggagcgtcctgatttacagaggatgttgagagccattgagcgcaggcaaatcaaccttgtcatcacgaaagatcttagccgtctggggcggaattatctgcaaaccgggcatttgattgaggactttttcccaaggaacggtgtccgctatatcgccatgaatgacggtatcgacaccttgcgggataacaacgatattgccccgttcaaaaatatcctgaacgagatgtatagcaaggatatttccaagaaagtccattcctcttatcttctgaaagcgcagaaaggacagtttaccgggtgtcttgccccgtttgggtatcggaaagacccggaggacaaaaaccatctgctcattgacgaggaaaccgccccaattgtgcggctgattttcggatatgccctaaacggtcatggtccgaactatatccgcagacggctggaggaagaaaaaatcccttgccccacatggtggaaccgggaacgggggcttcgcaatacccgcaccaaatgggaaaagaaaaacccggaaaacgggcggtatatgtgggatttctccgttatcaaagaccttttgatgaatcccgtctacaccggggcgattgcttcccagaaaaaggactaccgcttcaaaatcggcacgattggggaaaagaaaccggaggactggattgtggtggagggacagcatgaaccgctgattgaccgcatgagctttgacattgtgcagaacaagctgaaatcccgccagcgtccgggacagaccaatgaaatcagcctgtttgccggactgataaaatgcggcgagtgtgggaagtcactgacgatacgctgcacaaacgccaaacatccccagcggatttactcctgcaagacctacaatgcctttgggaagaaccactgcacccagcaccggattgattatgataccctttacagccatgtgctgcggaaaatccgggaatgtgccagagccgccctgatggatggggaagcggttgcaaaccgcctgacaaatacctgcgaagccgaacaaaaggaacagcgggaagcaatggaacgctcccttataagggacgaggaacggattgaggttctggacaaaatggtcatgcggctttatgaggatatgattgcagggcgtatcagtgagcagaatttcaacaccatgctggaaaagacacagaccgagcagacggagcttaaaacaaaagtgtccgagggcagaaagcggctgtccgatgaagtccagcttgccaatgacgcaaaacaatgggtggaagccattcaggaatacgccaacatcacagagctggacgcagccaccctcaaccgcttaatcaaagaaatcgtcgtgcatgagcgcattgacgaagataaaacaagacacatttctatcgaaattcattttaatctcaaacccatcccagaggtggaacaggtcactgcctgacctgtcccgccgggacggttctcttaaaaaacaccatatagattttttgtacgccgccgcccgccatcgagcagagttttacacctaattggggataaaacagcttatggcaggcggaggtatcgctctggttggtgcaacgctgatcccgctgctttccggcctgttcggttaagggctgacttatgggcagtctgtttgaatggataacagactggattaaagagggcctgatcgatgcgatcaccggacagtacaccagcattttcaactccgtcaacaatcaggttgcggatgtggcaaatcaagtaggacagaccccgcagggctggaatggcggcgtattttccatgatccaaaatctttcggaaaccgtcgtcattcccattgcgggcatgatcctgacctttgttctggtgtatgagctgatccagatgattctcgaaaagaacaacatgcacgaattcgatacattcaacatcttcaagtggattttcaagacttttgttgccacttacctgctcaccaactgttttacgattgtgatggcggtctttgatgtggcccaaaatgtggtgtcgcaaagtgccggtgtcataaatgggaacctggatgtgcaggcggcgttgtctgatctggaaacccagcttgaagcaatgggaatgtgggaactgattggactgtggctggaaaccaacatcatcaatctgtgtatgtgggtactgtccatcgtgatctttgtcattgtatatggccgtatgatcgagatttatttaaccgtgagccttgcaccgatcccgttttccacaatggcaaaccgggaatggggacaaatgggaaccgggtatctgcgttccctttttgccctgggttttcagggttttttgatcctgatctgtgttgccatttatgcagtgctggtccagtctatcccatcgtccggcgacgtgcacggcgcgatctggggaacggcgggttatacggtactgctggcttttgccctgtttaagacaggttcgttatccaaatccatatttaatgcaagatagcatgaacaaaaccaattctaaaaaggaggattttatatatgagtaaaaccaatacagaaaaaatggcgccggaaacacagacgccggaaatggcaaacggcatgaagctggatgtccgcgtgcgtccgattgctccaatgggaaacctgctggcgtttgccaatgttacgattggcggatgctttaagattgacggtttccgtatctgttccagtgaaaaggggctgtatgtcaatatgcccgcaacccaggataagggcggcaactggaaagatgtctgctggccggttacggcagagttccgcaagcagctcaacgatgctctcattgatgggtacggccaggctattgaaaatttgcaggcgactcttgaagcgacaaagggagctgcggaaaaaccttccctgaccggtacattgaaggaaaatgccggtaaggtcaaagaacagccgactaaacctgccccatctaagaatgagcaggctcgctaatgccggaaacgaaacagtacggcattatctatgccgatccgccctggcattatgacaggaaacatggaagcggcgttgcggaaaaccattaccccacaatgagcattgaagaaatctgtgccctgccggtatcggaacttgccgcaaaagacagcgccctctttctgtgggcaacctttccgcagcttaatgaagccttccgggtgatcgacgcctgggggttcaaatataaaacgctagcttttctatggctcaaacagaaccggaaagcggatagctggttttatggcatgggcttttggacccgctcaaacgcggaggtctgcctgctggcaaccagaggccgtccgaaacgccagtgtgcgggaatccatcagtttgtgatctcccatattgagcagcacagcaagaaaccggacgaggtgcgggataagatcgtaaaactcatgggcgatcagcccagagtggaactgtttgcaagacaaaagactcccggctgggatgtatggggcaatgaagtgaactgtacgctgactatgccggagcgaaaggggtgattttgatagaacaagatgcaaagcggctgcttatggaacggctggacgagtgtttgaaggttcatgcggatatgctggatgcacagaacatcggcagcatttacgagttgcagggattttcggaactccactattatctgaaggttgagcatgtatttactccggcggaagtagaggcacttctttcttttcaggacccgttggatgtagcccgatggtgctgggaagaaaataaccatgaacacagtttcccgatctgcgatcttctcaaagaaattgatgcagagcaaaaatttgaacatttcacaagcgaaccttccgcacaggacaaatatacgctcctgatgaaacggctgggacagaattactttgcttacagggaaagccttatgtcaagagataaggaatccttaattgaaaaagctgctgaaattacagccatgcaggaggcgtattcctatctgacaacaaagtttgagttcagggatgaaatgctggatgatgtgctggcgcttgagaatcctttgaaatactttgcagaccgttggcttatgccggtttcagatgtgttcgacgtggatatggatattcgggaaaatattgccggaatccgagacagccaggaatacctgtgtcagagagagccggctgtttctgtcctggcacggctgcaaaatgcggctcaggaagtgcgggaatgtccggctgcggagaaaccggtacgcgatttcggtgcacggtaatgggccggaaattatattacgatgggaggtgtatagatgccttatgtacctgtaccaaaggatttaaccaaagttaagactaagctggccttcaatctgacgaagcgccagcttatttgtttcagccttgccggacttgtcggccttccggtgtatttctttacccgcggggcgatcggcaattcggcggctgtacttttgatgatcgggatgatgatgccctttttcttcttcgccatgtatgagcgtgacgggcagccggcagaaaagatcttgaagaaccggctccgttataagctctggccgaaggaccgtccatacaggacggataacctgtataaatctatgtcaaagaaggaggttacaaagattgccaaaaaacaagcagcaggaagctcaggaaaagcgtctgcaaaaaaatatcaggcaggccaaaaagaccagagccgatgcaaagcagggcaaaactaagtctgcccgttccaagccgtctaaaaaaggcggcttttttgccgggctgaaagcagatgccccgcagacggtccagcagagcatcccctaccgtgaaatgtaccgggatgggatctgccggctgactgataccctttacaccaaaacggtgcagttttttgatattaactatcagcttgcacaggcagatgataaagcacagatcttcgagggttactgcgatttcttaaattacttcgatgcctcgatccatgtgcagcttacctttatcaaccagcgggccaatatgcaggattttaccagaagcattgacatccctccccgcggcgacgagtatgacggaatccgcagggaatacggggatatgttaaagaaccagttgcagaaaggaaataacggtctcaccaaacgcaaatacattacctttggaatcgaggcagatgacctgcgtactgcgaaaatgcgtctggaacgcattgaaacggatgtgctggcaaatttcaagaccctgggagttcaggcgagatccttaaacggactggaacgtctggaacttcttcacagccagcttcacccggacggtcaggaaaagtttcatttccagtggtcggatctgcctaagactggtctttctaccaaagacttcatttccccatccgggctgtctttttcaaaggatggaaagacattccgggtaggcgaccattccggtgctgtctcctttttgcagattttggcgccggagcttaccgaccggcttttagcggatcttcttgacttaaacgacgccgtgaccgtcaacctgcatatccagtctatcgaccaggcgcaggcgatccgaaacatcaagcgtaaaatgtcggacctgcagaaaatgaccattgaggaacaaaagaaagcggtccgatccgggtatgacatggacatcattcccaccgaccttgccacctatggagaggaagccaaaaatcttttgcaggatttacagagccgcaatgagcgcatgttccttgtgacggtactggtggaaaatatcgctgccaaacgtcagaagctgtttaatgatatttttgccgcttcgggtgtggcacagaaatacaactgtgccttaaaacggctggattaccaacaggaacaggggcttatgtcctcgcttgctcttggcacgaaccagattgaaattgagcgcgggcttacgaccagcagcacagcgatctttgtaccgtttaccacctgtgaattgttccaggagggcgaggcgttgtattacggtctgaacgccctttccaataacctgatcatggcgaacagaaaaacgctgaaaaatcccaatgggctgtttctcggtaccccaggaagcggtaaatctttctctgccaagcgtgagatcgtcaatgtgtttcttctgacggaggacgacatcattatcgctgacccggaaaatgagtatgggccgctggtacagcagttcggttcccaggggcaggtcattgatatttctcctacttccacaaactacatcaacccgatggacatcaatctggactattccgatgatgaaaacccaattactttgaaaagtgattttatcctgtcgctgtgcgaccttatcatcggcggcaaagaagggctttcccctattgaaaggacgatcatcgaccgttgtaccagactggtgtaccgggaatacctgcagaacccatgcccggaaaatatgccgatcttaggcgatctttacgagctgcttttgaaacagtctgaaccggaagcacagaatatcgcaacggcactggaaatctatgtcaatggttcccttaacgtgttcaaccaccgttccaatatccagatggatcaacaccgggtactgtgtttccagcttaagtcactgggaaaagccttaaaggaaatcgggcttttgatcatgcaggatgcggtgtggaaccgtgtcacagccaatcgctccaaacataaaacaacctggttctatatcgacgaattccatcttcttttgaaagggcagacaggaagtttcagcgtggagatctggaaacgcttccgtaaatggggcggaatcccatcaggtttaacgcagaatgtcaaggaccttctggcttcccgtgagatcgaaaatatttttgagaactcggactttatctatatgctcaaccaggcccagggagaccgtcagattttggcaaagcagttggggatctccccgcaccaactttcgtatgtgacccattccggtcccggcgaggggcttttgttctttggaaatgtgatcatcccctttgtggaccacttcccgaaggacacactcttgtacagcgtgcttaccacaagaccggatgaagtggcggggaccaaagcatgaggcaaaaattaaaatggatcggaggtgagaacaatggcacacgacagggaatttcaaaggaagcgtaaagatacccggatgccggtgcgtgattcccacggggaggatcagccggcagccaggcagaccgaacaggattttgacctgcgcagggcacgggacaccccttcttctgtcaacggcaagacacacaggcaggacatccctgtacagacggaattttcccatctgtcaccggaaacaccggagtccttgttggaacagggcgaagcgtatgcaaccgctttggatggtttttcggaacactttgagacaccggatgctgccaggacagcgcccccgatacaggacaacgtgcgaagcaatttccggcaggaggcttccagacgttttcttgtaacagagaatgcgacagaccatgataccggaaaatatgctccttcttccgaaggctcagccacaccggacagcacagacagatccagtcaggaacaccgttaccggacacatcagcatgggaacaaatatcaacagcgttttcaggaagcggcacaggcggaggaacaggcagcgcagaaggaaaagggtgtggatagcgaaccgccaaaaacatccaagctagaatttactgcggatgaactgccgccgcagacagaggataaaaagctcacccatgcaaggcggaaggccgaacgtactgcacaaaaagcagagcaggcacaaaatcgtctgccggcccggaagaaactgcgcatggagacggtttccgacccggagaccggaaaagccaaaaaacacttaaaatttgaaaaggaggtcaaatcacaaaaggcccatgtaaaagggcctgtaccactgcgtccggtcaaggcgggcgccaatactgccattggttacgcccataaaaagatttatgaggcagaggatgaaaatgtggggatcaaggcatcccaccgctctgaacttgtgggcgaggcagggcttcgcacggcatatcaccggcataaaactgccccctaccgaaaggcagcgaaattacagcaaaaatcagcaaaggccaacgcaagacttgcttaccggcaggctcttagcgaccacccggagctgaagaaacatgcgattgcccggatatggcagaaacaaaaactgaaaaggcagtatgccaaggctgcccgtgaagccgggaaacaggcaaaaaatgccgcagtcgcaacagagagggtcagcgtcggtattgtccatgcggtcaaacggcaccctgtaatctgccttgtcctcctgcttctccttttggtaattttcctgatcacatccctgttttccacgttctccaatatcgggaccggcggtttgggaagtctggctgcttctacctatcttgcagatgatcaggacatcaaccaggcggagcttacctataccgaatgggaaacggatctgcaaatggaaatagaccgggtggaatcagaccgccccggctatgacgaataccagtataacctgggcgcaatcgagcatgacccgtatgtgctgatggggtatctgacttctgcttatcagggatttacttacgatgaagtggaaagcgtgctgcggcagcttttccaggaacaatataccctgtccttttcagaagaaaccgagatccgttaccgcaccgaaacttccgttgatccggaaaccggggaagaaacccaggaggaagtgccttatgaatggcgcatcttaaatgtcaagctcacagtcacacctctagaaaacctggtcgtttcccggatgaacgcagaccagaaagagatctgcgagatcctgctgcagacaaaaggaaaccgccagtatgtcaaaaatgtctttggcaccaactggctcccttatgtgaccagttattacggctaccgggtacatcccatcagtggggaaaagaactatcacaccggtgtggacatcgggatgccggagggcacagagatccttgccgggcatgacggaacggtcacccttgcgggaaatgtcggcggttatggcttgtgtgtcgctattgaaggcgaggcatacgaaggacataccctgacgaccaaatacgggcactgttcccagatccttgtttctgccgggcaggaggtcaaagccggggatgtgattgcaaaggtcgggaataccggaaattctaccggggcccacctgcacttagaagtcctggttgacggccagtatttgaatcccctgtattttgccgataccggcgataccagcgaacggcacctgccggaagttggttcaggcggcacaggaaactacttcgattatgacattccaccggaagcccttgcggatgaacagtttgccgcaatgatggccgaggcggaaaaatatcttggctatccgtatgtatggggaggcgcaagcccttccacttcctttgactgttccggctatgtgtcctgggtgatcaacaactgcggcgttggctggaatttcggaaggctgaccgcggatggtcttttaggtgtatgtacgccggtatcaagtgcggatgcaaaaccgggcgacctgatcttcttccaggggacctacaacaccagcggcgcaagccatgtagggatctatgtgggaaatggaatgatgatccactgtggagacccgatttcttatgcaaacatcaatacaagctactggcagcagcatttttatacatttgggcgtctgccttaacagattggaggtaataaattgaatcctaaaattgaaaaactggaaaaggaaattgaaaagaccaaaacaaagattgcggaaatgcaggcaaagctccataagctggaggaacagaaaacagaactggaaaataccgattatgtggcggtggcgcgcagtttcaaactgacgccccagcagcttgcggattttttgaaatcacagcaggcagccccttcggaaactgttttaccgcaggagaaggaggatgtgcatgaggcttaaaaaactttccctgctgctggcgcttacgcttcttgtaagtgtcagcgcattacctgtaacggctcatgccggcggttccaaagacaccacaccgccaacgctgactgcttccctggagggcgatgccctgaaaatagaaagcagtgacgatctatccggcgtggaggcggtctttgttgatgaaaaccgtatcaactccctcaccgatgggaaagcgtcggttgcactaaaagattatgcaggaacagaaaaacaggtaagcatatacgcaaaagattatgccggcaaccgttctgatgtggtaaagctggataatccgtattacaaagaaccggctcctgaaaagaaacctgctgcggcagcaccccagagtccgtccggtacacagacaaaaccgcctaaggaagaaaaaccttccggctcaaacgctgcaaccccttccggcggcggaaattcttccggttcagataacagtaccggacagcaggaaaatacttctgcgatcccggaaggtgcatttaccccggaaggcaccggaacggtacaggacaacatcagcggtacggatggggaaaaacagttttacaccatcactacggacgcgggcaatgtcttttatctggtgatcgacgggaaacgggaagataacaatgtctacttcttaaacggcgtcacagagtccgacctgatggcgcttgcagaaaagaacaatggcagcatgagcatgattccccaggaagaaagctgcaactgcaccgaaaaatgtgaggcaggaaaagtcaataccggctgtccggtctgcaaaaatgacttgagtggctgcaaaggaaaagaaaagccgacggaaaccgaaaaaccggctgaaccggaaaagccgaagaaagagaccggcagtgtcggcacgatcctgtttatccttgctgccttacttgcggtcggcgggatcggttactatgtaaaaatcgtgcgtccgaaacagcaggccgaggacgatgcggaatttgaggatgacggttatggagaaggctttgacccggatgaggcatacggggaaccggaatatctttccgaggatgattttgacgacaaggacagcaaataaggctgtccttttagattttatgaaagtgaggattttttcatggaacatatcataaccaggcgccgcggctttcgcaagctgttggcgtttttgctttgtatggcaagcattttggggcttcttccggctcaggcttttgccatgtctgtcggacaaacggcaagctcctggctgggcgaccagtatgtgggctctgatggaaaccactaccgcgccccggcaccttacacctatcttgcctaccatgcagacggaaccatcgacgtacacaccagttccgggggcaatgcttaccggcactatatgctgacggattctgacgggatcagccatcaggtttactgtgtggagagcgggattccttaccatacttcggaaaacacctatgtttcagaaagcgggaccaacagccaatacctgaacctgcttcctgccgaggcaaggagggggatcaccctgactgcgatctatggctggaaacccggtgcgacgctccctgtttccgggatcaacgaggatgactataagatggcaacccagatcatcctttgggaataccagcagcagcttagaagcgatccgtacaaccgccacggaaacggccacgcagatggtgaccagtatttcagcgtgatcgccggacgaccggctgaaaaagcctatgactggattctggcacaggtcgcttcccattccacagtcccttcctttacttcttctaagaaaagcgaagcaccggaactggaactgaaatgggatgtagaaaaaaaggtctataccctgacggtcacagataccaacaacttgaagatcgacctggaggctttgaaaggcagcggcgtttctgtgacaagaaacggaaatgaatacacctttaccagcaggcagatgatgatggacccggtgctgtttgaattccgaaagaatatcccggtggcaaatgacatgctgatctggggcagaccaggctaccagaccatgatgaccggcgccagcgatccggtttccttctttgtaaagatcaaaacggaaacttacggtactgcaaaacttgtcaagaccagtgaggacggcattgtttccggtatcaccttccatatttacggtacggacattttgggaaatgaagtcaatgaggaagtcacgaccggagaaaacggccagattgaaaagaagctcctgccgggaacctatctggtaaaagagctgccggtggaccgctatgtgaccccttccgcacagtacgtgaccattgaaagcgggcaaacttcttcggtacatttcagcaatatcctgaagaagttccgcgtccatgtggtaaagagcgacgctgataccggaaatgcccaaggggacgccacgcttgcaggggcgacctatgggatcttccgtgatggcgaactgatcgacacttatactaccgggccggatggcagctttatgactcgctattatgtgtgcggggataactggacgatccgggagatcgaaccgagcaccgggtatcttctgaatgaaaccgtttatgaagtgggtgcatccccttccctgtatgaagtggaactcaataccacagaaaatcaggtgacggaaacggttatttacggaaatatccagcttgtcaagcacaccgatgacctggacccggatgtgcctgagggcgaaaataccgacgatcccaatgccggtatcatcgaacgcccggaagcaggcgcagtctttgaaatttacttaaaggcagccggaagctatgacgcggcaaaggaaagtgaacgcgaccttcttaccacggatgcggatggttttgcttccagtaaaccgcttccgtatgggcattatacggtccatcaaatcgcaggcgaggaaggcaaagcctttgtcccggactttacggtattcatttcctctgacggaaagacttacagctatatcctgaacaaccgcaccatcacagcccgtctgaaagttgaaaaatgtgacgcagagaccggaaagattatccctgtgaccggaaccggttttcagatcaaggatctttccaccggggaatttatcacccagaccgtctactatccgaacccggaaacactgaataccttctatgtttctgacgagggctggctgatgctgccggagcctttggccgccggggattatgaactttatgaggtagctgctccttacggctatgtgctttccgaccagccggtaccgtttaccattgacggcagcgaggcggttgtgacggtcacgcagtacaatatgccgcagaaaggccagcttaccatcacaaagaccggagaagtatttgcttctgtccaggaaaacgacggactgtaccaaccggtatatgaggttgccggacttcctggagcggtctatgatgtgatcgcagatgaagatatttataccggtgacggtaccttgcgggcagaaaaagatacggttgtggaaacacttacgaccggcgaggacggcacagcgaaaagcgggtctctctatcttggccgttatcgtctggaggaacgtcaggcgccttccggctgtgtgttgaatcctcaaccggaatatgtggaactgacctatgcgggtgagaccatagaggttacacagacagcggccggtctttatgacgaacgccagaaagtggatgtcacacttttcaaggcaatggagaccgatgacctgttcggtcttggcatgaacgaggaatataaggatatttcctttggactttatgcttccgcagacctgacggcggcagatggcagcgtaatcccggcaggtggacttctggaagtggtctctgtttcgtctgaggaatccggcggttacagcgcttccttcgcttccgacctgccttttggcagctattatgtcaaggaacgcacaaccaacggcgcctatatcctttcggatcaggaatatccggttgtctttgagtatgctggtcaggaaaccgccctggtacagatccttgtcaatgaaggcgaggctgtttccaatgaacttctccgtgggcgtgtagacggtgtaaaagtcggggaaaacccggaaggcggcgaggatgtcacgcttgccggtgcgctcatgggtctgtttagacctgataccgaagaatttactgaagaaaatgcgctgcttactgctattaccggaaaagacggcagtttttcctttgagaacattccttacggacactggatcgtcaaggagatctctgcccctgacctttatacggtaagcccgcagcagcaccatgtatatatcggtgcagacggacagcatatcgagatccgtgtggaaaacaccctgatccgcggcagtgtgcaggtaactaaaaccgaagctgtggaggaaccgtcccctgtggaaaaggaggataagaaagacaagaattctttcctgcgcttcctgcccggtgcagtgttcgacctgtatgcggattccaacgccaaccaggaatatgatcctgacgatcaaaagatcggtacgctgaaagaaaccgatgcaggctatcatacggcggaaaaccttctggctggcggctactttatcaaagaaagcaaagcgccggagggctatcagcctgactcaaacgcttactatttttccatcacagaagatggacaggtcgcagttgtggaaaatggagaagccgggcacgggtttaccaatgaggcttaccgcggcaacttaaagatcacaaaggattccagcgacgggcgcaaagatggttttgccatcgaggttaagagtgcggacggctcctactgcgagacattcaccactccaaaatccggcgtgattgaagttaagggccttcgtgtcggtatttataccgtaacagaagttgcaaaccgggcaagcaaggattacatcattcctgatgccgctacggtggagatcaaggcagatcagacatctacagtccagttctttaatgaaaaaccggaaaagccggataacccaaagaacccggaaaagccttctgttccctccaatccttccacccctcaaaagccggtaccgcagaccggggatgatccgtatattttcctgtatggcggactgctggcagccgtactgatcggtggcagcgtatttgctgtgtattatttcaaaaagggaaaatacagcaggacttccccgaaaagaacggctgtcggggtttctgtcctttcactctgcgttctggtggctcttggcagcggttttttggtgttccgtgacttgaaccagtatgctgagagtaaagatgcctatcgagatcttgccggatatgtggaagtaccggagcagacagcttccccggagtcggcacccgatccgacagaaccaaaacgggacgatgccgatattgtcctgccttcggtagactttgaaacgctccgtgaaaatggaccggacatcatcggatggctttctcttcctgatacggtgctcaattatccggtgacgcataccgacaacaacgagtattacctgaaccatctttatgacgggacctataacaaggttggctgcctgtttgccgactatgaaaaccgggcagatttttcagaccgcaatacgatcatttacggtcataatatgcgggatggttccatgtttgccttgctgaaccggtacgatgaacaaagttactttgatactcacaggcagatgtatctcgttactccgaaggggggttatgtcatggagatctttacggcatttgcagcaaaaccggaagaatccggcagtaaaacttctccctggcagctttcctggaaggatgacggtgcttatactacctggcttacagctatgaaggaacgttctgcggtggaaagtgatgtgactgtgacctgcagcgataaggtactgaccctttctacctgtacgccgggcggcacaggacgctttcttgtcatgggaaaactcgtgaaagtagataacgaaatatagattttagacggtgcgggggcaaaagctcccgcacctgctgtttacaaggaggattttattttatggtaaataccatgatttccattcccggctatgtccatctttaccgctcgcttttgcggttttacgacatgccggaaaatgaagtccgggaaatgctctatcttctgaatacggcaaacctggactgctatgagtattatcacccggaccgcagtgtgatccagagcggaccggtcgctttttgcggatggctggaaacgaaagactgccgcccttaccgcacagaggtacagctttacaaatcgctgctgtttttgaagcgcagcattgaccgtgacctgatcgtatcagctcaaagggaggctctgcaaaccctgcgctgtattatctccaatctggaataccgcttttataaagcctatggcatggagatcgaggacaaacgcacggtctatggggaatgtacctaccgtctggttcccagggaggatgaacccagcgtgtgcctgatgcacgactggatctacctgccaactgcctgatgtcacgaataatatataaaatatgtgacatatatgaaaactgtactgccttgcaaaatttttgatttttgatgtataaatcagatttttaatgggaacactcaaaataagaggaataggacctattgcaatcatgtcacgaataatatataatattcgtgacatgaagggaggcggtattgtggacaacggatatacaaaacgaatacgagagcgtgttctttctcttgaagatggaactgtttttgtgatgtctgattttgcggatattgcagatacatccactattcgtcaaagtttaagccgtttagtgcaatcaggaacattgcgccgtattttgaaaggagtttatgaaaaaccaaaatatagcaaacttctggatgaatatgtggcggcagacccggaagcggtggcgaacgcattggcacgaagttatcactggacgattgccccatgtgggaatacagcattgaacctgttaggtctttcaacacaggtaacagcagtatggtcctatatcagcgatggtccatataagacctacgagtggaactctacaaagctggaatttaagcaccggaccaataaggagattaccggattgtcctatatgacaagtttggttatacaggcattaaaaacgcttggcagatcgaatgttacgccagaagtcatacagatgctttccgaaaaactgacagacaaggataaacaggcttgtttgaaggaagcaaccgagtctacggattgggtttacgatacgatacggcagatttgtggaggtgaaaaggtacaatgagaaatatagcaagactttcagataacgaccgcagggagctgttcagaaatacagcagataaaatggggctgaatgatgccatcgtggaaaaagacttttgggtatgttttacgctggattatttatttcaccgctcaccatggaaagagtccatcacctttaagggaggtaccagcctttcaaaagcctttcacctgatcagccggttttcagaagatattgatttgattctggactggcgtgtattgggatatggcaaagatgaaccatgggagaaacgttccaatacaaaacaggatgcttttaacaaagaagccaatgtgcgtgcagaggtatttctgtccgaaacattctgcccggcagtcaaagccggcttatcccaggaaatcggttgtgaagcaaatgtctacatagatgaaaaggataaacagacggtcattttcgcctatccgcacctttttacgaatacggcgactttacaggtgatccgtttagagattggtgcgctggcagcgtggactcctgcaaaaacagcgctgatcgaaccatacgcggcaaaatattatccgaagatttttgagcaaaaagaaaccgcaatccttaccgttgccccggaacggaccttctgggaaaaagccacaatcctgcaccatgaagcgaacagaccggaacatttggaaatgccgcagcggtattccagacattattatgatctctaccgcatggctgcaacaccggtcaaagaagctgctttttccaggctggatctcctgaagaaagttgtagatttcaaaatgaaattctatcccagagcatgggcgaagtacccggaggctgtgccgggcacattaaaattactcccgccggaatatcggttcgcagcattggaaacggactataactctatgcaggatatgttgtatggggatattccgacatttgagacagtcatagcagcggtccaggaactggaaaaagagatcaatacactataaacaattacatatccatttatttgccggctattctaagatgctttagaatagccggtttcttgttttcaaaggagggatgctatattacgcaaaatgaagtcaatgccgtttttgacgaacaggtgcggctctgtgctgataccttgaaacggaaaaccaaagaatacaccggggatgatccggaccggctgggtgcatttaaggcagcggcaactttacagcacacaacgccccagcgtgcccttgccggtatgctggcaaagcatattgtttctctatacgatatgtgctttgccgaggaaacagtttatccgatggacacatgggacgaaaagatcacagacagtcttaactatctgttcttactgaaagcgattgtaaaggagggacataccaattaaacagattgaagtaaaaattttgaactgccaggcggtagcggaagcagaaaaaaacatggtctttgcggcaagacttacccagcagggacataagattgcctcaatggacgacctgatggagctctacgaaaaatcattcagcgttcagacagtagcagctatgggggcgcttccccatcctaccatccagaaatttgcggtgatcacggtagccattgtcggcgccagcaggcgttttctggcgcagatcacccgccaccagaacgaagtaaaatttatgagtgcatcgctgcagtacagcaactatacgggacaggcggatttcgctgtcccgtattctattatgacggctccggctgtggtacaggagctgtacttaaaaagttgtaatgaaagcatgaaatgttatgaagccctgtgcactgccggaagcgggcacgatgcggccggctatgccacgccccagggattacggaatgtactgctcatcagcgccaccccttatcagtggaaacatatcatcggccagcgggtatgccgaagaaatacagatgaaacaaggatcgtgctgttaaaggtctggaaagaactttatgacctaagccctgccttgtttgccccgtcactgaccgggcctttctgtcagttggatcgatgtctggaagggaaaatgacctgcgggcgaaaactgcaggcagatatgacgccagaggatattttagaaaaagactatcccgctctttgggaaggaggctgccgatgaaaataaaactaatcgattttggcgtgccggagcaccagcgtccttaccgtcctcatggcaatgatgccggagcagatgtttatctgccctatgactgcaccttacagcccggagaaatcgccaaaattcctcttggctttggactggaaataccggatgggtatgcgggatatatctttccccgtaccagtatggcggtaaaaggtctggtctgtgaactgccgcctgtggattccggctaccgaggagagatccatgcgatcatcagcaatgtaagcaatcaggcgcagtctctttttaagggagcccgtatcgggcagcttgtgatcacgccgactgtcattgcggattttgtaacagatctgggaacagagcgaggaaccggcagctttggcagtaccggcgaatagaaaaaggctgtttggggaacagtttttgaatacttatcggtatagggagcggacatttcgagaacattataaaatataataaagaaagtcacgaaaaaagcggccattaccgtgaccgcctactttctgctattgagttctttcataataccaaggatatattgcatggattgaggatcaagctgtcttgcctctgcaatgaattccttcaaggtttccgggtaagtatttccttcgtcaaagaattcctgcggagtcacacccagatattcgcagatgtagaaaaaagactgcatagcgggaagtgactttttattctcaatattattgatgtagttgtttgcctgacctaacgataaagacatatcgcgtgcggaaactcctttctgtgtccgcagcttcgctaatcgttccgggacaaaatcttcatacatcgccttcacctcccattctgtaatagattgtaccttacacccctttattatccgcaaagagaaaaagggtattatcgttgacttgctaaataaaatctattactatgtgaaaagtgaagaaatttacctatcagatggagggatgaccgatgaaaggaaagacttgctgtgttaccggacacagggatttgccgcagaatgagatcaacaaaataaaagccgctttggaacatgagatcgatgctgccgttacagatggatttacctgttttatgagtggctttgcagatggcgtggatcagtattttgcagagctggtgttggaaagaaagcagactaatccggcgctggagctgatcgcagtgatcccttaccgcaaacgtctggacagcctgaataagaaaacaagaacccgtgaactgctggaggcttgtgcggatgttgttgtcatacaggaaaaatatctcccaagcgtctactcccacagaaaccgctatatggtggagcactccgaccgagtgatcgctgtatatgacggacgggaaaccggcggtacggcaaagacgatccgcttcacccatcggatgaaaaaggaactgcgggaaatcccggttggagagatcgtcctgccggatcacttgaaaccaaaaacaaaatagatacctgttgatgcgctcactttgaagtgggcgtttttctttacccatttttaggaggaatgcttatgtggaacctgatttcacatttccttacctttgccggaggaatggcttccggcgttatgttgatgtgtcttatgcaaaccggaaaacttgcggataaagaatttgaaactatgaaggaggaataaaaattgaaacttgtgattgcagaaaagccctctgttgctatgtcactggcagcagtattaggcgcaacggaaagaaaagacggttatctcgaaggttccggttatctggtgagctggtgcgtgggacatcttttggaactggcacagccggaggcttacaaagaacagtacgccaaatggcggtatgaggaccttccgatcctaccggaaaactggaaatatgaagttccaaaggataagaaaaagcagcttgcccttttgtgccggctgatgaaggacaaacgggttgattctgtggtatgcgctacggatgccgggcgtgaaggagaactgatcttccgtctggtctatgaatatgccggatgtaataagcctatggaacgcctttggatttccagtatggaggatgcggcgatccgtgagggttttgaccatctccgtcccggcagtgattacgataaactctatgatgcggcagtatgccgggcaggagccgactggctgatcgggatcaatgccacccggcttttttctgtcctgtatggtgtcacactaaatgtcggccgtgttatgtcaccgacgctggcacttttggtacagcgtgagtcggatattgaatccttcatcagcaagcctttttatgtgccggaaatcacctgcggaggttttactgcttccggcgaaaaaatgacggaacgatccgaggctgaaaaaatccgtatggactgtgaccacaactccgcttttgtgcgttctgcggaaaagcaggtaaaaactatacagcctccccgcctttatgaccttacaactctgcaaagggaatgtaaccgtatttatggctatacggctcaacagacccttgattatgtgcaatctctctatgaaaagaagctggcaacctatccgagaacggacagccagtatttgacgaaggacatgcaggcaaccgccgcttccctgatcctatggctgcgtgacaatatgccctttggaaaaggctgcgccggagagccggacattgaccgggtaacagacgacagcaaagtgaccgaccaccatgccatcatcccaactgtggagattgcacggacagacctgtcggagcttccttccggggagcgggatgtgcttaccctgcttgccgtcagactgctttgtgccacaacgcaggtacaccgatttgaagaggtcaccgctatattggactgccagggatatacttttacggcaaaaggaaagactattttacagtccggctggaaagaggtggaacggattcaccgtatgagtatcaggcagagtgaaacggaacacaaagaaaatgaagctgtcgctctccctgtgctgcaggaaggacagacttttgaagctgtatcagcaagtctccgtgaagggaaaacttcaccgccgaaacactatacggaggacacactgctgtccgctatggagactgccggtgcggaagatatgccggaagatgccgagcgtaaaggattgggtactccggctacccgtgcggcaacactggaaaagctggtttctgccggatttgtacagcgaaagaaaaagcagctcattcctacggaaaaaggaaagaacctgatcgcagtcctgccggacaatatcaaatctcccatcttaactgcagaatgggaatccatgctgaaacaagtggaacatggcgaactgtcggcaacatcttttatggatcagattgcagatatgagccggacgctggtaaaagaacatactaccccggaagaacgttttgcggatctgtttccttcttccagaggaactgcacatgaagccgtaggggtatgtcctcgctgcggagccccggtatatgaaggaaagaaaggttttttctgcgacaacagggaatgttcttttgctctttggaaagataaccgtttcttttccagcaagaaaaaatccatcacaaagtctgtggcagcggctcttttgaaagagggccgtatttctatgtccgggctttacagtgaaaaaacaggaaagacctatgatgcggaagtgattctggatgataccggcggtaaatatgtgaatttcaagctggaatttccagtaaagaaaggcaggcgtaaatgagcgatcgaaaaacctttgaatatggcggttatcacttcacgcccatacgaaaatttcacaaaaaagaaggcgactttttcgccatatcgaaacggctggcaagtgaccccaacttagggctgtgtacctatcaggatcggcaaaaagcaccttatgattacaaagacttttataccgtttcaacagacaaagaatgtgatattttccgctgcgaagaaaatggattgttgtatgtaccaggaaaaaatgaactttttatttaccatgaaccaaaacagaaaaagcggaactctatcgccgatgccctttcacagcccaggaatgttactgatacaaccgaaatttccagcggtcggcaaagcagagccccggaaaggtaggcgttatggcggagagagaattgaaccgctcggagcgggctacgatccgaaagctggttacggagctttgcgccaactatgactcccaggataagatctgccttcctctggacagcccttgttacatgctgaataaatggtggaccggtgcttattgcaggtactttgaaaaagcggtgctgccggtggatgcagcactggaatcagccattaccggcgaggacacctccatgagacagaaaatatgccctgtgtgtggaaaggcatatcttcctacaaccagccaggcatattgttccgctgcctgccgggtctatgcaagacggaaatccgagcgggaacgcaaacgccggaagcggcaaaaccaaccatgatatgtccgcaacttagccttaaaagtccttgattttcaagggctttttgcacctgttttcaagggagctgtataagaatactccggtgctttgaaatgaggttaagttgcggacaaaacatatattttaacaaaaacgataggaggcgattttttgaatatcaacacgattactgcggaggatcttcgccgcatgccggataaggaaggactgattttacagggctgtggcggggatctgacagagtgggtggacgggatcaatgaaatgctgacaaaagcaggcatattgaaagatggctgtcagtttgagaatgtggctgcttttcagcacggcgaactgacctgtctgctttacccgtttgatgatgtgaaactggatataggaaaacttgccctgtggcgtttacagacccatgaagtctatggcggcacatggctgtcggactttgtgccgaattatttaggcggatttatagaaacaccggaagcgttggcagataaaccggattgtccgctgatcggagcagatgggaacatttttaatctgctgggtattgcttcccgtactttgcgggagcatggtttgaaagaacaggcaaaagaaatgtctgatcgggtatttgtttccggcagttatggagaagcgctctgtatcattggcgaatatgtcaacatcacagattccaaactggagcataagaattctctccgtcagcagctaaaagcaacaaaaccggcagacccggtaaaaaagcaacaaacttccaaacagcaggaacgataaggagggatgcggaatggaaaagaaacggacctatggtgtatgggcagtacgaagcagcacttctattttcggaccggcacaaagctggtgcaaggaaaatggaaaaccgttggagtttgataccaaagctgctgctgaaaactatgcaaaggaagccaacgaacatacgacagcaaatgtccgatactatgtgaaagaaaaagaaccggagcccggtgctgttcggaaaggaacatctcaaccggagctggatgcacgcagccatgaagaagtgataccaagaaatgatgcagcggaaaaacaaaatgagattccgggcagacagattccttctcaaacagatccgctggtagaaatccgctctgcggtccatagtaattacgcgggtatggtcgctatgctgggtgcggacaaccgtgtgtatttggggcgtgaggaacgctgccattaccagaatatgcagccatcttactatgacaatcaggacggttccctgtgttttgtctgtgatcagcccgacatgtactattttctctatggagaaggctgggcgcatacccaggcggaaatgctggaacgagggcttaccctgcgccagtatgaagaatttgcaagactgcaaaatggggtccttgcacagtttaccacccaaagagaaattctgtttgccggacagccatttcaggcgccggagagttatctgcgcaatgcagaactttatgaggaaggtcagaccggcaactacaatatgctggatggcaggctgaacaacgaacctcctgtgcgcccggatctgacagacggacagacggatgaagaaatccgggagctggtgccggaagcaaagccgtctttgatggaccgtttgaaagcagacaaaccggagcatgaagcaaggcagatgatccctccggtgccggaaagggaacgctgatggccggggtaagatttgaggatgtagatcttttgggtgctctttcccgtatcgtagatcttcatacccaacattataaagaggactttgacctggataaggaactgatctcaaaactggctgtgtcagagcgttcagaggataaacagcttctttggatgtcacgcccttgcggaacctataccctgcgcgaacgggaagtttatctggagggcagccatgaaaacaaagtgtggcggttttaccaggagcagacaaatgatcccgttttggcttatgccatctctttgaaagaagtcagggacggaaaaatatttggcgatctctatccgctaaattatagagaacatgtggaacggatgaaaaaattgacctgtccaatcggaaatgtagccgttgcttttgaggatggaaatgttatcacgattccctatcaggaacggagacaatttatgaaccggcttatgccagagcatggagcccctaaaacaatgacttatctgccagaaaatgagccggagctgatgataattctaaaacgggaacgcctcaaacgcagctatcatgcgacagccggaaatctggaggaatatcttgataagctggaaaagaccaccctgcgggaaaaactcaaaagagcaaagacggcggtttcgacgcaggaggtctcatctcataaaagagggttggaacgatgaatggcgggcataacaaaaaatccgtccgcgtcgaatttgtcatgtccgaagcggaggccgaactggtaaaagaacgcatggcggaacttggcattaccaacctgtcggcatatctgcgaaagatggccgtagacggttacatcatccaccttgatatgggagatattcaggaaatgatccggcttctccgcatttgttccaataacttaaaccaatataccagacgggccaatgagaccggcaatatttatgccgcagatatagatgacatccgcacccgtctggacagcctttgggatggcatggacaaactgatccggggatttgcaaacatttcataaacagccggaaagccgttgctttctttttgccgtcacggtaaaatttttataagggcagatgcccttctgaaaggaggcaaagcgtatgcgtttgataggtaaattactggcacttccctttatgctggttacggggattctttatctggtatgtaaatttttagtggttctttccggtgcggtacttgggattctttctgggatcatctttctggcggcattggtgctgttctttgtcgcaggatttttgccgggtcttgcatggcttatgatcgcctttcttatcagtccatacggtctgcctctggcggctgcatggctggtagggatcattggcggggcaaacagtgccttaaaggattttatatttggttaagcagatttggcggggcgcataggcagccccgctctttttctgcaattataacttctctgattggaattaagttaaggaggtgacgaaaatagcgaccacaagactgatgcctctgcatgtaggaaaaggtcggaatatctctactgcgatctcagatattattgattatgtagaaaatccgcagaaaaccgattttggaaaattcatttatggctatgagtgtgatacccggcttgctgatgcagagtttcttctgtccaaacgacagtatgcaaatctgaccggcagaaatcagggtgcagatgatgtgatcgcctaccatctccgtcaggcatttaagcccggcgaagttacgccagaagaagctaatcagatcggcagggagctggcactgaagctcacaaaaggaaaccatgcctttgttgtctgcacccatgtggataagcaccatgtccataatcacatcattatcaactctactacactggactgtcagaaaaaatttcgcaacttctggggttctacctgggcaatccggcgaatgaatgacaagctgtgtttggagcatggactttcgattgtagaaaatccgaaacccagccgggagcattatggcacatggctgggaaataaaaagcagccttcctttcaggagcagatacgcattgctattgatgctgcattagaggaaaagccaaaagattttgaggaacttctaaagaagctggaggctgccgggattgaagttaaccgtgaaagaaaacatcttcggttccgagttccgggacaagaaaattatacccgatgcgatacgctcaaaggcgattatacagaacaggccatcaaagaacgaattgccggtacacggacagtaaaatcccaccatactttttcaaaaaaaccggtttccaaagttggattgctggtagatatagaggctgcaatccgttccggcaaaggtcccggttatgagcgttgggcaaaagtgttcaacttaaaacagctttcccaggcagtgctctacttaaaagaacatggcgatatgggttatgaggatcttctggaaaaagccaacgccgctaccactaatttcaataccttatccgttcaaattaaagatttagagtcaagaatgaacgccaatgccgagctacaaaagcagatcgtaaactatgcgaaaacgcgggctgtctatgtagaatatcgcaaagccgggtacagcaaaaaataccgaatagtacatgaggctgaaattctgctacaccaggcggcaaagaatcattttgacgagctaggaatccaaaagctcccctctgttaaatctctccgggaggaatacaccgatcttctggaacaaaaacggaaagcctattctgcctataagcaggccaaaaatgatatgaaagaacttcataatgttcgggctaatgtggaatatctattagagatttcttccccaccgctaccgcagcgcagcacagaaaaatcacgtcaataaggtttgtcagcttttcgttttcagcgttccaacggaacgcgcagccattgccaccggcaatgatctcaggggtttggggatatgtcaccaacaagcatttagcaggaattccgggaacgggatttctgctaaatacgcaatcttacgtaagattgcattgcttgccagtagttttaagagtttttggcagaggatctgtttacagttgccgcattgataaacctttgataactgcctataatagagttgttattttgaactgctataacagagaaatgcaaaaaattaaaattttttgtccgctgtaacatttcgcggacatttgcctgttatactatctgcaaaaagcaaaggaagtgagaatatgaagcagattttaattgtcgaggacgacagttttttgaataagatgttagactataacctgaccgcagacggctacggcgtgacttctgccctaaatgccagaaccgccgcagacgccatccgccagcgggaatttgatttggtgctgctggacattaacctgccggatggaaatgggtttgagctgtgcaagctgataaagccccagcacccggacactattgtaattttcttgactgccaacgatcaggagagcgaccagatacggggctatgaagtgggcgcggtggactacatcacaaagccctttgtaatcggggccttgcagcggaagatcaaagccatgttcgccatgctggaacaccacaaaccggctaaggacatttacgacgacgggcggctgtttctggacttctcggagcagacggcttccttaaatggcaagcccctgaccctatctccgatggagtataaaatgctgaacctgttccgtaaaaatccccggcaagtgctgacccgtgggcagcttttggaaaagctgtgggatatagacgagaggtttgtagacgaacacaccctgacaacctccatcagccggattcgcagcaagatcgaatccgacggcggcgcgccctacatcaagaccgtttacggcatgggttatcaatggacgggaggcgaggcaaaatgaagtttcaaaacctctcggtaaagcggctgtttggtcgggtggcaataggacttgtcctctccatgtccgggatcaccatagctctgtttcttgtgacgaaacagacggcggtggtgctgacgggcggggcgctgctgttgtgcgcccttgtggggatttttgtactgacgcaggcgtttggaaagcggctgtcgcagtttaccgctgacctgtgccagaccttagaccacatgatcgccggaaatgaagcaccccagcgcccggaggacagcgaaacccagcttgccagaattggacaccggctggcaaggctttaccagatcatgcaggagaaccgccgccgggtagacgaggaacggcaggagttacagacccttgtatcggatatttcccatcaagtgaaaacgccggtaagcaatctgaaaatggcgactgacaccctgctggaaaagcccatgaccgaggcggagcgcaccgactttatccggggaatccgcagccagacggataagctggactttctctttcaggcccttgtgaaaacttcacggctggaaaccggcgtgatccagttggataagaagccgggccgcctctttgataccgtggcgcaggccatgagtgggatcgtgtatgcagcggagaaaaaggaaattgccgtatccgtggactgcccggaggatttgaccgttttccatgacagcaagtggacatccgaagccctctttaacctgctggacaatgcggtgaagtacaccccggcagacgggaaaatcacggtgtcggtggtattgtgggaaatgtatgtggagatcaaagtgaccgacaccggcaagggcatttccgaaagcaatcaggccgccatcttccggcgcttttatcgtgaggaagaagtacacgaacagcaaggcgtgggcattggcctgtatctggcccgcgagatcgtaacgcggcagggcggctatatcaaggtgatttcggagccgggcaagggttcggaattttccattatgctgcccacaaaatagaacgcggcggacggccatttccggctgcccgccgtaaatttttttgaaatgtccgagcattgtaacatttcaccccgattttcaatgaaattttttggtcgctgtaacatttcgcggacatttgggttttacaatagccttatcaacaggcagaaagccttgaaaggagtttttagtatgagcgttttgcagacgattgatctgaaaaagtattacggcacagagccgaacatcacccgcgcccttgacggtgtgaacttctctgtaaatgacggtgaatttgtggccgttgtgggaacctccggcagcggcaagtccaccctgcttcacatgatgggcggactggacactcccaccagcggaaccgtgattgtccgaggcgaagaactggcaaagaagaacgacgaacagctcaccatcttccgccgccgcaacatcggctttatcttccagaactataaccttgttcccattctgaatgtgtatgagaacattgtcctgccggtggagctggacggggacacggtggatcagaagtttttggacgagatcgttcacctgctgggactggaagataaactgaaaaatatgccgaacaatctttccggcggacagcagcagcgtgtggcgattgcccgcgccctgattaccaaaccggctattgtgctggccgacgagccgaccggcaaccttgacagcaagaccagtgccgaggtgctggggcttatcaagcgtaccagtgcggagttccggcaaactgttgtgatgattacccacaatgacgacatagcccgccttgcagatcggattgtccgcattgaggacggcaagattgtggaataaggaggtggtaggctatgacatggccttttgagaatgataccagtgctatcacgaaaaaaattgctaaaaacgatatagataaaaaccgagttaaaaagggtttctcgcttactacgatagtctttgcaacagcactactcatgatgttgattatgtttgaaagcggatatgaaactacaaaagatagaatggcagaagggcagccacaagttgttttttatgatctttcccagcagcaaattgagttgttgtattcagaggaaaatatcgaatccatcaaagtaactgaaacagaaaacgggtacgatgcttcaattaccattgttgatgccacaaaaatgacgcaatatggtttttcttctgcggtcgataatatatcttcaaaatatgacattcatcatgtaacaagaaacgacttattcatggatagtttgcccaacggaggactattaaatcagaaaaacatggttcttatgggggtggcaatcttcattataattgtgagtgctttagtaatttacaatgttttctatttatctgttgtaaatcaagtgcggcaatttgggcagcttcgtactgtcggaatgacacagcagcaaacaaagaaaatcatccgctacgaaagaaaaattttatgtagaattggggttccgattggtctactgattggcggccttgctggatatttgttgcaacctgatggttgggattggatcgctgcggtattctgggggataatcattagtcttatcatcaatttcgttgtaaaagtatcgttaaatagacctacaaaaatagccctcagcatttccccgatcctttccagcaaatatatgatggaacgctttgattgtaaggttactaacaaagaaaaacgaaaattatcttctttggggctagcaatcataagcataacatcacactggaaaagcattttagtttctgtgctttctttgggcctaagcgggcttttattcgtcttagctgcgacatacaccgcttccattgatccagagtctattgtaaagaaagatgtctaccagtatggacaatttgcgattgaaaccactggtaaatacagcgagaaagtttcagagattgaaaacttcaaacaaaagataatggagtttccaaacattagcaatataaagcaagttgttgaaacagatattagttgggcagggaaaaatagcacaggcaaagatcaactttctattattaccgctaatgactttgcttctattcagcaattcagcgaatcaggcgatttggattaccaacagcttgttcaatctaaccagatcgttgctgtaaatggtgtagaaggtatttctaaaggcgatacagtagaatttacatttggggatggcacccaaaaaacttatacagtgggaggcatattagatggtgatctgtattcaaatacagcaatttatggcggctggtttttaatgcccactgaattgatagcagaaaattcggtttcttttaatgtttctattaggttgattgtaaaggcaaatgataccggattggaacacaccacaatatctttagagaaattagtggatatgtcagatggattaacactgacgactatgcaagaagcgattgcttcaaaagaagctactataaggcaggtaggaatatctatcataggcgtaacactattcttgctgctttttagtatcattactttcgcaagtacaatcattacaaatatagcaacaaaaaagcgggaatacgctatgtttcaatccatcggtatgactaggaaacaaacagaaaaaatggcactatgcgaaagttgtgtattggcgataggaagcttgatacttactctgatattgggaattattttagggcagatattgataaaaggcttgataagtgcagggattttctatttgtcatatacatttccattagcattgtttactgtatattgcattgtggtggttctgattattttgatgattactatttccgctttttacagtttacaaaaaactccgttggttgagagattacggattgtagactaaggaagtagacccaactaatataaaagtgtccgagcgttgtaacatttcaccccgattttcattgaaatttcttagccgctgtaacacttcgctgacattggggttttacaatacccttatcaacaaaagtgaggaggcgacgcaatggaactgaccccgaccttgattttgaatctggcgctgctgatcgtaccgcccgttgtccttgtgctggtgttccggcaatggctggcccggcacatccgctggacggttgccttgactgccctctgtgatgttctcctgttttgggatgaactgttctactatgagagtttcggtctgtttgctgtgctgcttctggtacagttggcagccactggcgcagcagcgttccgcatttactgcaaacaaagaaagtaaaatacagcctcattactactctggtaaatatcccggaactgattaggcggggtgttttttatggaataaagttggatggaatattagcggatgaaataggcacttcctgttaaaagaaattggtcaggatagtaattttattatcccgaccaatttttgctattatgaacttttcttaaactatattgctttttggagccttgcatgttatactgttatacacaacagcataacagttaaaacacacggaggatgcagcaatgaaactgattatttcaaatgtatctggcgtccccatatacgagcagattaaacagcagatcaaggcggctattttatctggcgagcttcaagccgaagaaactttgccctcccttagaacacttgccaaagacttaaagatcagcgtcttaacagtgacaaaggcatacacagaattagagcaagagggctttgttaaaaatgtgcaggggcgtggatgtttcgtaatggggtctggttcagaactgattaaggagcagcttatttgcaaagtagaaaacaatctcaccgaagcaataaaagctgcaagaatggcaaatctatccacagaggaattacatcgccttttggacattttaacggaggtaaaaacagatgactaattatttagaggtaacgaatctttcaaaatcttttgattcttttcagcttcacaatatcagctttactttgccaaagggatatattatgggcttgattggcccgaatggttctggcaaaacaacgacaatcaaactgattttgaatatgctcaagcgcaccggtggcacagtcaaagtgatggggctggataatatcgcagaagaacaaaaagtaaaatcagagctgggcgttgttttcgatacaaattatttcagtgatgattggaaagtgtcgcaggttgaaaaatccatttcggtattttatccaaattgggacagccagaaatttgcggatatgttacggaaatttcacattgcaccaaccaaaaaggtaaaagaactttccaaaggtatgcagatgaagttaatgcttgcctgtgcgttttcatacgacgccaagctgctgatcctcgacgagccgaccagtggacttgatccggtttccagagatgaacttttgaaaattctttcagagtatattgaagatggcgagcatagtgttttgttctccacccatatcacaggcgatttggagcgtgcagccgattatattacctacatcagttatggcgagctgtactttactggcagcaaagatgattttgtagatatgttccgcattgtaaaaggtggaattgaggaactgtccgatgatctgaaaaataaggcggctggtattcgtacattccctacgggatttgaggctctgatgaaaaccgaagatattagcggtttccctaacctgaccgttgatcctgccaccattgatgaaattgtagtgtttacaagcaagaaaggtgacgattatgagtaatattttgaaatccacaaaattagatattgcattggtaaaaccatattttaagacgatttgctttaccctgctcctgccgattgtgtttgccgcaatcaatcgttctttgctgacaggggtatcatttgctatgtgctttattgccatgacgacgggatataccttttccatcacagaaaaaaacagcatggatcgtctgtttggtattttacctgttcgtaaaagcgagcttgtgatcggacgctatgtttttgtccttgcaatggggcttctttccttgattatttctttgattgcacagccgcttgtcttgaaagtgctgggtgaaacagttggcgtatttgatattgtaactgccgctattgcaggagtattcttatttgcactctataccgtgttccagattccgggatattacaagtacggctcaatcaaaggacgggtatttatgtatattccagtggccggttttttggtgactttacttcttctctctaaaatgccagctatcgggaactcaattatttcagtcgttgaatcttctccgatacttctcgttttccttgcggtttttgctattgtcgtgatgtatgcggtttcaatcttcttgtccattcgggttatgaagaataaggaaatgtgaggtgattgtatggatttcacaattttggcagttgtgcttttgattggtgttggcgttcctatccgtaataaactcatacggaaatatcgggataagaaaaagaatgatcgcaattcggagtgaacaatatggagaaaacagagttcatccgctgcccagtctgcgggaataaaacacgcgacaaaattcgggaagataccgtacttaaaaattttcctctcttttgtccaaaatgtaaaagtgaatgtctaatcgacattgaacaattagacttacgattagcattatgggaataccgtcgttactaatgacagtattctgtttgctttatgagaaaatgctcaatgctggaatgggcaataaatttgaatttgacaaggagataataatgataccaatttctgatattctcatccgctcaattagtgggtatgtgtttatggttccagtcttcgtactgtatttcttgtggctcaaaaaattggggagaacacaaagttttctccataccgctgcagtgtttgtttttggttattatttattcggacttttgaccgtcacaggcatcggctttacaagcacaatgacctttcgcccgaacatttcttggactccatttatcggtatgataactgggccaattgataccattctgaatattattctgtttgtcccgttgggatttttcctgccgctgctgtacaagaaatatcatcacatgaagacggttgcattgactggctttctgttttctttggctgttgaaattgtccagatgtttggctggggttcttccgacatcaatgacttgatgacaaataccgctggagcctgtattggatttttagtttattgtctgctgtcaagaatcttgcctgccaatctgaaaaagcaacttcaatccagccgtgtcaatgctgtggctgaagtacttctctttgctatttgcacatttgccattatggtcacggctcagacttggtttgtccatgatgtgctgaatgttccataaattgtatcggaaacaatcggtctcagatataaaaaaatagtgtcttctgtttgacacacctgcagaccgatttttccgtattgaacttagtcgcgtcaacgaagccactacctatggaatttcaatcttttccttcctgttatgcttggacagattgaataattctctttgtgttatatctattatttttaggtaatagtccacaacggcttctaacatgaaggtacaaaaaataaaagttgatcctcaatcaaccctattattgtactcttcaattcatacttttcgatctcaatggtagtatggttagatagacatctgttgccgctatcccttggtaagttacccgttcagcttacctacaaatttagaatacaataaatggcatcatttgaacagactatatttttgggatgaactgttctactatgagagcttcggtctgtttgctgtgctgattctggtacagttggcggccaccggcgcagcagcgttccgcttttactacaaacaaagaaaaggctgaatagaaaataggtatcatcaatcaaaaatatcattggaggtataacttatggaaaaagaaacaatgggaactgtaatttcagttataaaacaatggtggttaaaagtgaatcgtaaacctgcccgcgttcatgcgatggatggcgcagcctttccgcatattatcaaggtcaaatatacgatagacggtaaagattacatctgccgaaaatggattggtgcaggaaacaacgttcctgacaagggaacaacgattaaagttacctattgggaagataagccatcgaaagcaagaattgaactctaatcaataaatttattaaaatacggaggtgatgatgtgatgggacattagctgtttttgatatagaagaatccggcaagcagattggagaaaagttatttctgcttcttaacgaggaacaaaagaatgctctaatgcaatatattttggaacaaggagcctgtcatggaacggtattcaattcctgtcacacttccttcgcagcaaagaaaaattctctaacagaaatacaggaaggcgagctttatctatgcctggaacaccgcactgtcagggttagggaacggatgatcaacctgacaagtaaggagtttgatatactggcattgctcattgccaatcccaaacgtgtttttacttacgaactgattaccgatttggtttggaaagaggattgtgatttctattcgagaaaagcgattcataatcatataagtaagctgcgtaagaagttgcgctttgaaccgtatcttccaaactatattgagagtgtcgccgggatcggctataaatttgaacatctataacatgagcccacaaggtattgtttttctctttccgcactacacgctcttggtgtttcctaatagttaacttttttgaaaaaagtgaaacacgtctccattgtatttgctcttttccttcattataataatgatatatgaggtgagtaattatgaaagagataaatattggccgtgtcctaattaaaaatcgtcacaaaagaggcattacacaggatgaactggctaaccatttgggtgtttctaaaggggctgtttcaaaatgggaaacgggagtttcccatagttaaagataccacaccaaatatgatgaacccacgcttatacactaccagctataataaaccgcaaggacagcaatttgatactgctgtcctttcttttataaaattgcagtacacagaaaaaagctgtaaaatgataaatatatttgtccttgtaacaattctcggacatttgcctgttatactatttgcaaaaagaaaaggaagtgaggatatgaagcagattttaattgtcgaggacgacagttttttgaataagatgttggcctataacctgaccgcagacggctacggcgtgacttctgccctaaacgccagaaccgcagccgaagccatacgccagcgggaatttgacttagtgctgctggacatcaacctgccggacggcaacggttttgagctgtgcaaactgataaagccccagcacccggacaccattgtgattttcctgaccgctaacgatcaggagagcgaccagatacggggctatgaggtgggcgcggtggactacatcacaaagccctttgtgatcggggccttgcagcgaaaaatcaaagccatgttcgccatgctggaacaccacaaaccggccaaggacatttacgacgacgggcggctgtttctggacttctcggagcagacggcttccttaaacggcaagcccctgaccctatccccgatggagtacaaaatgctgaacctgttccgtaaaaatccccggcaagtgctgacccgtgggcagcttttggaaaagctgtgggatatagacgagaagtttgtggacgaacacaccctgacaacctccatcagccggattcggagtaagatcgaatccgacggcggcgcgccctacatcaaaactgtttacggcatgggctatcaatggacgggaggcgaggcaaaatgaagttgcaaaacctctcggtaaagcggctgtttggccgggtagcaatggggcttgtcctttccatgtccgggatcaccatagccctgtttcttgtgacaaaacagacggcggtgctgctgacgggcggggcgctgctgctgtgcgcccttgtggggatttttgtactgacgcaggcgtttggaaagcggctgtcgcagtttaccgctgacctatgccagactttagaccacatgatcgccggaaatgaagcgccccagcggccagaggacagcgaaacccagcttgccagaattggacaccggctggcaaggctctatcagatcatgcaggagaaccgccgccgggtggacgaggaacggcaggagttacagacccttgtatcggatatttcccatcaagtgaaaacgccggtaagcaatctgaaaatggcgacggacacgctgctggaaaagcctatgaccaaggcggagcgcaccgactttatccggggaatccgcagccagacggataagctggactttctctttcaggcccttgtgaaaacttcccggctggaaacgggcgtgatccagttggataagaaaccgggccgcctctttgataccgtggcacaggccatgagtggaattgtgtatgcagcagagaaaaaggaaatcgtcgtgtccgtggactgcccggaggatttgaccgttttccatgacagcaagtggacatccgaagccctttttaacctgctggacaatgcggtgaagtacaccccggcaggcgggaaaatcgctgtgtcggtggtgctgtgggaaatgtatgtggaaatcaaagtagccgacaccggcaagggcatttccgaaagcaatcaggccgccatcttccggcgcttctatcgtgaggaagaagtacacgaacagcagggcgtgggcattggcctgtatctggcccgcgagatcgtaacacggcagggcggctatatcaaagtggtttcggagccgggcaagggttcggaattttccattatgttgccgactaaataaagcacacttataacaggagaaaacaccatgaaaaaaatcaatttttgcaaagcaacaacaatcatcttaataatcaatgttattttatctattgttttatttttcgttgttcctgataaaatagcaattcaatgggtaggtacatcccccagcaatgcagtagattcttactatgtatttttggtgccggtattgtcagtgctttttgcttttacgggaaaacctatttttacaatgttcctgtttagattgtggaatagaactaacgagcatttagtgacatacttaaatttgtgtctgcaagttgtatttcttacttgtgaaatctatatcggattatataacctatgtaattttaatgttgccattagtataattctcattgtggaacttatgatagatgtggtgattggattgaaattatttcacaatcaatctatctaaaagattgtgtagtatgattcggcggacgaccatttccggctgtccgccgtgaatttttttgaaatgtccgagcgttgtaacatttcaccccgattttcaatgaaattttttggccgctgtaacatttcgcggacatttgggttttacaatacccttatcaacaaaagtgaggaggcgacgcaatggaactgcccccgacattgattttgaatctggcgctgctgatcgtcccgcccgttgcccttgtgctggtgttccggcaatggctggcccggcacatccgccggacggttgccttgactgctctctgtgatgttctcctattttgggatgaactgttctactatgagagcttcggcctgttcgctgtgctgattctggtgcagttggcggccaccggcgcagcagcgttccgcatttacaacaaacaaaaaaaggattgaattttatgagcattttacagactatcgacctgaaaaagtattacggcacagagccgaacatcacccgcgcccttgacggcgtgaacttctccgtaaatgacggcgaatttgtggccgttgtgggaacctccggcagcggcaagtctaccctgcttcacatgatgggcgggctggacacccctacttccggcaatgtgattgtccgggacaaagaactgtcgaagatgaacgacgaacagctcaccatctttcgccgccgcaacatcggctttatcttccagaactataaccttgttcccatcctgaatgtgtatgagaacatcgtcctgccggtggagctggacggggacacggtggatcagaagtttttggacgagatcgttcacctgctggggctggaagataaactgaaaaatatgccgaacaatctttccggcggacagcagcagcgtgtggctatcgcccgcgccttgattaccaaaccggctatcgtgctggccgacgagccgaccggcaaccttgacagcaagaccagcgccgaggtgctggggcttatcaagcgcaccagtgcggagtttcggcaaactgttgtgatgattacgcacaatgacgacattgcccgccttgcagatcggattgtccgcattgaggacggaaagattgtggagtaaggaggtggcaggctatgacatggccttttgaaaatgataccagcggcatagtaaagcgcatatcaaaccgcagtatatcggcaaatcgaaaaagaaatatctttattattttgacgattgcacttgccagcgcattgctatctgctattgtcctctatggctttggggttatgcaggaaacgcagaaccgcaaccaaaaaacagcgcagattatgtatcatgcgatttctgaacaacagggacaggaactatacaagcaagaagaaattgcgtgggttggggaattttttaacgcattttctgaacaggtaaaccattcaaccgtgaactttacttatgcaaatgcagatatgctaacatcccaaagtatgccctattcgggagatttaccagcttcggagaatgaaattgtagtgcaggaatcctttttggatagtttgggctattcaaatgaattgggacagacaattcaaatccccttttctgacggcactacccatgatttcaaattgacgggaatcttagatgtgaaaaccggcgatattgggcgctatacagccattatatcgaaagaattagtaagacagcagtatggcgacggaggcatgattgattattacattgggctgaaaggcgctcaaaacatgagcgaggaagaagccaccaactatgcaaacactctggcgcagcaattaaaaatttccgatgataatgtgattgtccgttccacatattttaacttaaaggacgaaaatcacggaagcgatatgctgttctatttcttgatcggttttgtaactttcattggttccggcattgtgatctattcgattttttatatttcagtagcaagcagtatccgtaactatggacagcttcgcacaatcggaactacaaaacgacagatcaaaaagatggtttaccgcgaggggaaattacttgctgccattgctatcccgattggtttggttattggaaatgtgattgggtacttcctgattcctgccggttggtactggctgactactttatgtgtgacggtcggggttggcctttttgcatttattattgtgatgattgccattcatactcctgtaaaaagagctgcggcagtatctccgctggaagcattgcgatattccgattatcaggggaaaatgaaagaaagttccgtgttgcaccgtaaaataacgcctgcttcacttgctaaaatgaatctgtccagacaaaaggcaaagtccactttaacaatactttctctttcactcggcggagtattggttgtattgatttcgacaatgttagtttcctatgatggcgttgcagaggcaagaggcagggctttccctgtcggtgaatttaacattcagctcaacgcaaatcaatcgtgggacactgctggtatttctttgtctggattgcagcaaaagaattttctaaatgccgattttataaatgcagtagaatctattgatggcgttacaggaatcaagcactggtattacacggacgcagaatatcgtgtaaatggtaattctggaaaatggattcagggcttttgccgagatgaacagcagaatttggagaaagagcgaattgcgggaacgactgattatgatgaactggtggcaggcaatggaattgtcttgcttcaagagcgtgccgatctctatgatattgaggctgcgttgggtgataccgtcgaagtggactataaaaccgaatccggccaaattcgcacaaaggcctataccgtcatgggcattgtaaacgaatattcttactccggcttctcaaaatgctttgcgcttccggagcagtttatgaatgaagcgaccgggatagattgcacaggtacgatttccgtaattaccgatatgaaaaaatatgatacggtagaagctgcattaaatcaactgatagacggaaatagcgatttggttatggaaaccataaaagaaagtatcacttattatagcggacttcaacaactttctttcggggtattgttgatcgtggctgttattgttgtgtgcttttctttaatcaaccttgtcaatacgacaatcacaaacttcttatcccgtaggcaggaaattggaatgttacaggcgattggtttgagtaaaaagcagcttatcaaaatgctgtgttatgaggggttaatgtattcagtttttgctacgctggtaacattggttttggggactggactgggcttcctatccgtacaggtcgttgtgaaaacgatgaatccatacttttactattcatttccgtggctgatcgtattgatatatttagcaatcctgctgattgtgcaattcaccttgatttcttacacaactggaaatctgaaaaaacaatctcttgttgagcaaatcaggacgatggaatagccgtatgggatcggcggggcggcgtgtgctgccccgcttttttcgccatttctcaaaaaaatttttgaaatgtccgagcgttgtaacaattcagcctgtttttctgtcgaaatcaaaggcacctcggacatttgtgtaacatttgtagtttatgcttgtggtaaatcaatattgggggtgaggacacatgaaaaagatactgctgatcgacgacagcgacacctatacatggtgtctgaaaatatacttacagcaccggggctacccggtgaaaacggcttgtacgctgaaagaagcgcgggccgccatccaagaggaaatgccgctggtggtctgctgtgatctcgacctgccggatggttctggcatggactttctggacgaggtgcgggccgcagacaaggagctgccttttgttctggcgtcctgccatgacaaggacgactacgaacaggaggctatgcgccggggcgcgacgctgtgcatggacaaaatgaaagggctgctgctgcaagataagctggtggaatacgcttaccggcagttatccggcgaaaaggccccgacttttcacaagctgctctttgtctatgcagaagataccagcgccgaagtgctgcgggctgctatgctacaaaagggctttgacctgattctggtttcctcgatttgggaagccaagcgccggatttttgaggataaggaaatagaactgatcttgtgcgatctggaactgccggacggcacagcaatggagctgtttcatacgctacggcgggtggcggggatgttccaaatgaagaatccccctgtccggcttctgccgttctttatcctcaccgagaacaacgaccctgccacggaatatgaataccggcatgagggcgtgaacgactatatcaccgccccggtcaatatcccggagctgatccggcaggttttgttctttgtggagtaattgaaaaattttatggaggtgatgatgtgatgggacattagctgtttttgatatagaagaatccggcaaacagattggcgaaaagttatttctgcttcttaacgaggaacaaaagaatgctctaatgcaatatattttggagcaaggagtctgtcatggaacagtattcaattcctgtcacacttcttccacagcagagaaaaatcctctgacagaaatacaagaaggcgagctttatctatgcctggaacaccgtactgtcagggttcgtgaacggattatcaacctgacaagtaaggagtttgatatactggcattactcattgccaatcccaaacgtgtttttacttacgaactgattaccgatttggtttggaaagaggattgtgatttctattcgagaaaagcgattcataatcatataagtaagctgcgtaagaagttgcgctttgaaccggatcttccaaactatattgagagtgtcgccgggatcggctataaatttgaacatctataacatgagcccacaaggtgttgtttccccttgtgggcttgctttttgcagcatatattctaagagcggaatatgtagaaaattgcgaatataaagagtaaaaagcgaatatctgcggactgataaaggaaacataaccgatataattttctcccaaggaggtatcaagcagccgattcaggttcctccttgatgggaggaaatgcctatgcgtctatgcaacacagatctgcagataaactgctttacattcagtcacctatacgtcgtagtccagctcgtatggattgcggcgtttttggtttcgacaaagtttgagcattttcgctgtcaacctcccggaaaaattttatactgctgctttggcgcgcctgttctttgtacgggcgcgcttttttgtaccctttttttaatcagaaagagacttagaccttatcgctgccgcagcccaccctctgatttcgatttttgccatcaactcaaacatcgaaattggaggaaattactatgaagaaaatcaatcttcgggattattacccgtattatacacaggacatgatcgttgaggtgccggatgaagttgctttgttgcttcgggaatatatgttgttggaagaagcctatcggattcgtacataccgctataaagcattttactctctggatcgagacgaaggtattgagcgtgagatattgcaaaagcctcttaacccggcagaaatttgggaacagcgccaaatgacggagttgatttataaaggtctttccaaacttccggtaaagcagcgccaacgaatctatgcacacttttttcttggcatgagcaaagcagatattgccaaagcggaaggaacacacaaaagccggatcacccgttctatcgaagccggattgcgtagtctggaaaaatatttcaaagaaattttataacagacggcaactttgcccctaaaaatgtactgaatagtagagggacatattcggcgggacaagctggacgggtgtggtaaggaagcatatacatcctcccaccccaactgcaatatcaatttgtctgccatgccccttgcttgttccttgacaaccgaatatacgctgttacaggtacttcattctgtgttccgagcggcagatggggcggcgcggtgacaggcggcctaaggaggtgatggatccaggctgtccgagcgataaacgcaacctacgaaaccggctgtggcaggccggacgcgataacgacgcagatcataatggtacttcttcacagcttcctaaagacttggggagagttcctgcggcgtttgcttgctctggcaaagcggcggcgtatgcgggactatgatgcggtgacgctatccgcagcctgtaacagccccgtccttataacagaaggacttgccggggtgcgtggcaaatacggcagtaaaatcgaaatcagatataatgggccggatttatgtgtgtaataaccatagatccgacctattcatgtggttttgataacacagttttcagaagggagttgatactatggaattgaataccattgtcagtgaagtgggtacactggtagacattcgggatgtctctgtcaacaaagaactttcccgtgatgaacgaattgcagaattcgttcagcaaatcaaaaatccataccattttaagtgtgggcgttttactgtacaggccagcttttctgctgaaggtgctaccctggaagaatgtatcaaaggtattttgcgatagctgcaattttaagaaaggggctgacttttccgtaaaagcatggtagaataagaatcggaaaaggaattgaatatggattaaccacacttcttgaattgcggggatttttctgtgcaacgaaaggagtgtttttttatgcaggtttacaaagcgattaagtacatccgtctttcttatacggatgataaaacagtagaaagtgacagcgttgctaaccagcggcgcctgatcgatgactacatagcccgacacccggaaattgaggttgtggcagaaaaaattgacgatggttatagtggtgttttgtttgatcgcccggcatttcaggaaatgatgcggatgatcgaacaaggcgaagctaactgcgtgattgtcaaagacctctcccgcttaggtcgtgagtacatagaaacaggccgttatatgcgcagggtatttccagcctatggagtgcgttttatcgcaattaacgataatgtggacacggaaaatgacgctgccgatgatctcacggtttctgtcaaaaacattatgaatgaggcttactgtcgggatatttctgttaagacacggagcgccctggaagtaaaacggcgcagcggggattttgtaggtgcttttaccatctatggttatgtgaaagtcggcgataaacacaagagcctggaagtagacgaatatgctgccaatgttgtgcgggatattttcagaaaacggctggagggattcagcgcttcccatatagcggatgaactgaaccgattaggaattctttcacctttggcgtataagcgcaatcacggaatgcctcatgcaaaaggtggctatacagaccgaaaggattgcaaatggtctgcaactacaatcatccgcattttgcaggatgaaacttacaccggaacactggtccagggcaagcagacaacgccccatttcaaattaaaagagcgtgaggacaaaccttcttcggaatggattcgtgtggagggaacccatgaagcgatcatacaaaagcacgattttgatctggtgcaacggctccgcaggattgacacaaggacttctcccaaatcggataaggtttaccttttttccggtattttgatctgcggctgctgtggctgccgtatgacccgcaagacgaaccgctataaagacaaagagtatcactattattactgcccgaccggcaaaaagaatggctgcacatcgtcggtcatgctgaaagagtcggatctgattgaatgtgtgcaggacagtttgaaaggacatattgaaaatgttgcttctctggatgccctgctgtccagtatcagtcaggaacggatcaaccgggaattggcacaggaatatgccgcacagatcagagtaaatgaaaagcgtgtagcacagaccgagggctttaaggcaaaactctatgaaaatctggtgagtggaattctgacaaaggaagaatttctctcttataagcgaaaatacaatgcagatattgaactgttccaaaaggcaatcgctgaatggaacgataaacttacagatgtattggaaaaccgaagcgaacgaaatcgttggatcaaccattttatgagattttctactatggaggatattgaccgccgggcagtcatgcagcttatccgaagcatacgggtaatgggtaaagatgaactgcatattgaatttaattaccaggatgaatatcagaaagcaatctctttggcggaacagattgctacaaaaaatgaagaaaggatggtgggctaaatggcaagaaaaagcagaaaacagacggcggcacctatgccggcaccatctttatatgtacatgtagctctgtatatccgtctttctgtggaggataacaaaaagcggggctgctcagtagaaaatcaaaagctggtactgaatgactttctttcagataaaccggacttcgttgtgtatgatacctatatcgacaacggagcgacagggacaaattttcaccgccctggatttcagcaaatgctatctgatattgaagcaggccacattaactgtgtgattgttaaggatctttcccgattagggcgaaattctattgacacaggttattatatcgaacagtatttccatgctcataatgttcgtttcattgctgttacggatcagtttgatacagcggattccggaaatcttcatggcggtatcatgctgcctttgaaaaatatgatcaatgaagcctatgctctggacattggacgaaaaatcaaagcacaagcgcggcaggctatgaaagacggcgactatattggtgcacgggcaccttacggttacaggaaagatcctgataattgccataaacttctgattgatgaaaatactgcccctgtggtaaaacagatttttgaatggtcacatgagcatgtggcactgaaccggattgtccgcaatctaaatgagatggggattccggcaccgagccattataaaaaggccactggcgagattaccagtccgggtctgattggaagcggcaaatggcagacccgtacagtgatgaaaattttagaaagcgaagtctatacaggcgatctggtgcaaggaaaaacaaagattgtagatcatcagcaggtcaaggctggagaagataatctgattattgcaaaatgcacccatgaaccgatcatcagccatgagttgtttaatgcagttcaggaatacagaaaacagatctgtgaagaaagcaaagcaactccaaaacgtccctacacaccaaacattttcaaaggtaaagtgttctgtgctgattgtggcagaagccttcacaggcaacgcgccgagcgccggaaaggacccgacacttactggttccactgccttacaaacagccgggtagaaaaagatagctgcaaaggtgcgatgatacaggagaaagaactgatttctactgttacggctattcttgaaaaagagctgacagttgcgctgggaatgtcgctgccactctttcagttggaggcaagacaaaaacaggaaaaagataagctgaaaattcagatgtcggccaaacggcaggaaattgaaaaaacacgccggctgatccgtggcctatatgaaaattttgtacagggtattttgacaaatgacgaatactttgaattgaaagcggattatgaacatgctatcaatgctctgtctggtgagattgaagtatttgaaaaatctatggactccctggacaaccagcttgccagataccgtgcaatggaaaaggatgcaaaaacactggcacaggatcatgtgctgactgcggaactgattgaacggctcattgaacgaattgagatagaccacgagcggaatattcatgtgaccttccgtttcaaaaatgaatttcagggaaaggcggtggaaccgtgcgcaactatgtgattgctctttatatccgtctttctgtggaagatttcaaaactgaaagtttgagcataccaaatcaaaaactgattcttcgtgaaaaagctatgtctctgccggaatgggataacagcgagattttggaatttattgacaatggtcatacagggacaaactttgagcgtccggcggtgcaggaacttttaacaatggttcaggccggaaagatcaactgtattattgtaaaagacctttcccgatttggacgcaacagcattgaaaccggctattttattgagcgggtatttcctctttaccacacccgttttatttccgtcagtgatgattttgacacagctaatttcaaaggtgatactggagggattgatattgctttcaagtatcttattagcgagtgttatagccgggatatgtccatgaaaaccaaaagtgcaaaatacgcaaagatgcgtcgtggggaatatcagagtgtcatctgtccttacggctatcgcaagagtgcagacggacgtatggaaccggacgaggatgttgccccgaatgtgcagatgatatttcaatgggcgtctgaaggcaacaccgcagccgagatcacaagaaaactgtatgccatgaatatccccacccctggggaatatcgcaaacttaaaggcaaggactattacaatgtttcccgaacaaacggcgtttggagtacatcaacggtcctgcgtattttagaagatcaaagatatatcggtacctatgtaattggcaagagaaaggtaaaagagattggcagccgacatacacagttaaaggatgaaagtgagtggttcaaaataccgaaccatcatccggctattgtaagtgtggatctatttgagaaagccaatgcttctattaagcgtttctctctgttaaataaaaagccgcgtgattatctgctccgtggtaaggtattctgtggatgctgcgatcatgcaatgtctctacgaaatggtgcgtggttttattgccgtcattccgaggtggctgaaacgcttccttgtcatggtgtgcgcataaagatggcagatctggagcaggttgtatttgaaacaattcgggctcaaatgtgtccggcattgggaattgatagcaataaggataaattggatttgcagacagtccagcaggccgaacatgaagaaaaactccgttctattcaagacagcaagcggcatctttatgagcagtatgcactcggagagattgatttggaaacctatcgaacacgaaaagcggtttatgacacggagctggtacaagccaaaaatgttcatgctgtcattactgcacagacaaagcagataaaaagtgattatgagattaagctgaaacaacaggaaattgtgcaggaagtcggaaatgccaacacgctgacaaaagctctgattgaccggcttatcaacaaaatttacgtctttccaggagatcggattgagattgaatatgcaacacaggatttcttagaaacaaaggaatctgaaaaggaggtataaccgtgaacacccatttgaaacagctatgggcagctatgaagctgcccgaaaaacttcaaaaaaagttataaatttttttgtcgtgggcttgacatacgggtgtctcaaatcatgcacgcggattcgcttcaccccagacactttcgatcctctgttcatttcatgatgcagataagatttggaaattgtgaaaatccgttcgtcctctttcggctcatacagcattttcagataatcctgcatctcatcacatataaattgtggcatcttgataaatctgttacttttaaatgtctttggtggggtaatcacatcttcccggtttaatctttgatatgatttgttaattcgtagtgtatgcgttgtaaagtcaaaatccgctggtgtcagggcaagcaactctccttcacggataccacaccagtaaagcatttcaaaagcgtagtaagaaactggtttatccatcatcacatctgcaaatttcaaatactcttctttcgtccagaacaacatttccttatattcctctattgctatatttccagctttctgtgccggattagaaggcaaatgataaaaatcaactgcatgattgaaaatggcacttaactggctgtggattttccgcagatatgaagcagaatacccttttccattcgctctcttaaatgcaagcaaatgattctgccatgcaatcacatcttttggttcaatttctgcaatctttctctccccaaagtatggaagaatttttgttctggcaatattattcttagttccccatgtgttatcccggattcgttcctttttatcttctacatagatttcataaaaacttgcgaaagtcatatccagttttgcatcatgctttaacatttgttcgtgtttccacatctgcgcttctcgcttcgtaggaaatcctcgttttgaagtctgtttcgtttcccctgtccagtcggtataccgataaaccactcgccacttcccagtgacattatctttgtaaatactcatacaaattctcctctctttctcttacacttcgctgtaacatacttttttgcggaaataattggtgtttactctgccagctaccgtaagataacccagcttctgtaattcttcatttagctgtttgacaatcttataagcataagacttggaaacacccagttccgctgcaacttcttctactgtcataaaagttctgttcgtcacatcgcatcccccttttctatcttaacgtattttgtttaagttcttcttgctatccgaaattgctcatgctatactgaacctaaacagaattgttttattttcttcacaattaattatggcaacacaaatgacactataaggaggcaagcaaaaatggcaatcggacaacgtatcaaattttttcgcaaccgcaaaggcatgacacaaaagcaactcggagaacaactgggattcaaaggaaaaacctcagatgtccgcatggctcagtatgaatctgaagccagagttcctaagattgatcttgtaaaacaaatgtcccagatctttgatgtcaatactcatgctttaacagtaccggatattgatactcacataggtctgatgcatacactatttgcactggaagatatgtatggtctgaagataaaaaatgtagatggacaacctcatctctgccttgactcttccatatctgctcccggctcatctgtcgatgaaatgcttcgtgcatggatgaaacaggctgacaaactggaaaacggtgaaatcagcaagaaaaaatatgatgaatggagatataagtacccggaactggatacttaccagaaacgtgccaaggtaccatctcaggaactgagtgattacctcgtaaaagaattgactaaaaaagaaaattaagaaaaaaccttaccgatattcagttttttacttctgaaaatcagtaaggtttctttatatacgttatgaaataaaatttttatcttttgaataatcgcaaaatgttgccattttgttgccaatcactaaacaaatttgtttgcaaccagtataaatactgggctcttatgattgtgtggattattcaaactcaatcgttcccggtggcttactcgtcagatcatagaatattctattcaccccacgaacttcatttataactctgctcatcactttattcagaacttcatacggaatctccgctgcctctgcagtcatgaaatcaatcgtattaacggctctaagagctacagcataatcataagttctctcatcacccataacaccaacgcttctcatattcgtaagtgctgcaaaatactgaccaattgtcttatcaagtccggcattttcaatctcttcacgataaatagcatctgcatcctgaacgatacgaactttctcagctgttacttcgccgatgatacgtactccaagtcccggtcctgggaatggctgacggaatacgagtctttcaggaagtccgagctcaagtcctgctttacgaacttcatctttgaaaagatcacgaagcggctcaatgatttctttgaaatctacaaaatctggaagtcctcctacattgtggtgagatttgatcacagcggattctccgccaagaccactttctaccacatccggataaattgttccctgtgcaaggaattcaacagtaccgatcttctttgcttcttcttcgaagatacggatgaattcttcaccgataatcttacgttttgcttctggctctgtaacgcctgcaagtttgttataatatctttcctgcgcatttacgcggataaagttcagatcaaactgtccttctggtccgaagattgcctcaacttcatctccttcatttttacgaagaagtccgtgatctacgaatacacaagtaagctgttttccaatggctttggaaagaagtcctgctgccactgaagagtcaaccccacctgacaatgcgagcaatactcttccgtttccaaccttctcgcggatctctgcaattgtattctcaacaaaagcatccatcttccagtcgcccgcacattcacatacattttttacaaagttgttgatcatctttgttccttctactgtatgaagtacttctggatggaactggattgcatacagtttctcagctgcgttctcagctgctgcaaccggacagtcagcagtgtgtgctgtaatttcaaatcccggagcaatctttgaaatataatcaaaatggctcatccaacatgttgttgtctctgaaacaccctcaaatactttggagtcttttttatcaataataacttctgtcttaccgtattctcttacatcagcacgctcaacttttccaccaagtacatgtgacatcagctgtgcaccataacacagtccgagaaccggaataccaagcttgaacagttcttctgaataagtcggtgaatccggctcataacagctgttcggtccgcctgtgagaatgattcctttcggattcattgctttgatcttttcaatatctgtcttataagaataaatctcgcaatatacattacattccctgacacgtctggcaaccagctgattatactgtccaccaaagtcaaggacaatcactaattctttcttcaaatctttcctcctgtaaaatccaatcaaaactatttactttatctatatatctttttctgtttttcattatagtagaggaagcattgatttacaagtatttgtttatgtaaaataaaatcttatccacaatttctattactatacacggtaattattccccttctgatctatccagaacaaagaatgtgcctcggcaccctcttacgcctgcggtggtcgcttgcgacacctacattgtacaccgcagtgcgcattctatgtatccactgttatgggtataatatatcaaaaaagatgccgaacaaatgctcgacatcccatttttatgttccattttatgctgcaaatctttctagctgtctttcaagttctgtgcaatcgtctgcatacatctgcagttcaatcacgttattcaatcccagattcatgattccaagtaatgacttcgcatctactactgcccgtcctcttctcatgtccatgttaaagtcaaatttacatactgttttcaagaaatcaatgatctcatccgggtgtttgaaagtaatgttcattgtgctcattcttttcacctctttctgccttaacggctatgaaatccttttcacttttcacatatatcatagcacattttttatatttaaaagggcgaaattttttataaaagtgtatttttttaattaaatatgcctcttattctctacttttttctataagcaatatgaaattactcctaattatgaaatcccattggagttacgtctgtattccgtcggtaaaattccttcctcctctttaaacaccttactcatatattttggatcagagtaaccgacaagccccgcaatctgattcatcttatattttgttgtcctgagaagctcctttattttttctatcctgtatttcctcacagtttctgtaaaattatatcctgtctccttcttaaactgagaactcaggtattcttccgatacataaagttggctcgctgcttcttccaatgtaataccactgtcatattcttttcttataatttccattgctttttggataagcgtactgtactgctcaaatttatgctcatatgatatcatccgttccaagccttgaatcgctttctctatctgtttccagctgatggcataggtaatctgctgcataagactcaggatttttgtttcgtcaatctccccgccataatttctataattcaatccagctgccatgcaaaaacgaatgatactgtatttcatttcttttggaaaatatttttctcttttcatttcctcacaaacaagttgaaattgtctggcaattcctttcttgttttcatcgaaaatcatttctcgcattcgttgttctaattctaccggataacgcaccggaacagcttcaaatttctcaactgtctgctgacagattaaaactcctcgcggctgaagaagattccattccatgagacttcctgcctgaatcattgcatctaccagctttgtcaactgttttgtctctatccatacacaaataattgtccccggaaaattcctacataacccagtaaccacatttttttgaaaatattctttccagttccttgcttcacgtacccggtaaatgatcagatacacctgtttccatcgatccgaacatataacagatgccgaaaatccacactcacgtctacagatttcttcgagaaatccacgtatattttccttctgctcctcgtattcgtctgccattgaaaccgtaaataaatatcccggatcatccactgtaaaaccaaatttccggatagtcatttcatttaacttttgattcgatataatttctccatacctgcagcttaacagaatattttcaacagtaaaagaagcctgcatccaatattcattcctaattttttcatgaatacggcttaatgccttcttaagctccatcggccggaacggctgtactaaatatccgtccacccccagatcgattgcctgctttgcctgttgaaaatctttatcctttgttataataatcacacggaactcacgtccttccgtgcgtaattttctcaaaagatttaacccattcatccgcggaagcccaatatccatgataacaagatttggctgcataactgttatcatctcatatgcagactgtccattccctgcagtccccgccaactcgtaattcggatctacgcgttttaaaccttttttcagttcttctaatactttttcatccctttcaacgattgccacccgcatttgaacaatctcctctcaatgtccgtgtttctgattgaatatccacttttattgtaacattaacttcaataattggaagcatgcaagtgtaaatatttttctctggtagcgagccctccccggatgtgacgttctgatttgttggtgtctaaaaccttacgtgtttcatgagccaatgatggattgatctgaagcagacgttctgtaacatccttatgcaccgtactcttactaatccgaaactgttttgctgtctgtctcactgtcgcattattttctataatataatttgcaatttctactgcacgctcctcaatatattctctcatagaaaagcccctgcatagtttgttttttacaatctatgcaggggcaaattaatgtatgtctaattcctgttccatctattcgtggaaaacattatactatacaacttaatactcaaatactgccacaccatatcccggaagaggatatgcaaaggaatatttctgaccatcacattcctgtttctctggcttgtaaaccaatgggcgttcttctcctgatccgccgtattttgtctcatcactgttaagaacaagcttaaactgctttcttctcggaacaccaacacggtaatctggtctgtctaccggtgtaaaattgcatacaaagagcagatttttcttaccatcttttgaatgtcttgtgaaactgaaaatactccggaagatatcatccttattgatccagtcaaatcccttcggatcattatccaactcatacaatgccttattcttcttataaagatgaagcaaatctttataccagttctgaatctgctggtgcggttcttctgcaagaaggaaccaatccagttctctctcttcactccactcacgaagctgtgcgaactcctgtcccataaagagaagtttctttccaggatgtcccatcataaatgcatatgccaccttcaagttgcggaacttatcccatccttctcccggcatcttattcaacatggagcatttcagatgaacaacctcatcatgagaaagtacaagaatatagttctctgaatatgcatactccatggaaaatgtcatcatgtgatgtgcattttttctaaaataaggatccagtttcatgtactctgtaaagtcatgcatccaccccatattccacttcaaagtaaatccaagtccgtcatcctcaggagatcctgtcaccttcggccatgctgtagactcttctgcaatcatcataacgcctttatttcttccgcaaactacagaattcaaatgtttaaagaatgcaatcgcctcaagattctcatttccgccaaatttattcggaatccactgtccatcttctcttccgtagtccagatacagcatagatgccactgcatctacacgaagtccgtctacatgataatgttcaacccagaacaatgcattcgccagaaggaagttagaaacttccggtttttcataattgaaaaccttcgttccccaatcaggatgctcaccctttctcggatctggatattcgaatgtcggtgttccatcaaaatctgccagaccatgtgcatctttcgggaaatgcgccggtacccagtcaagaataacaccgatattattcttatgaagataatttaccatatatgcaaaatcttccggtgttccatagcgtgaagttggtgcataatatccggttacctgatatccccaggaaccgtcaaacggatgctctgcgattcccattaactcaacatgagtatatcccatctcttttacatactttgtaattgcttctgcaaactcacgatatgtataaaatccttcatcttctcttccgggatgtctcatccaggaacccatatgcacttcgtaaatagacactggttcttctttgttatcccacttctcacgagctgtcatccacttactgtctgaccagttcagattagaaatatctgtaattctggatgctgttcccggtcggagctctgcataattagcaaatggatctgctttatagatcttctcacccgcctgtgtctctatacagaacttatataaatcccctttcttcgcctccggtacgaagcatgtgtatattccgagaggctctcctctcttcatcttatctttcgtctcatcccagtcattaaactctccgattacagaaacgtttactgcatgaggagcccataccgcaaaatatactcctctttttccgttctttgtcacctcatgggcacccatctttttataaatctcataatgatttccctgcccaaaaagataatggtcaagttctccgatctcataaggctgcactttcgtcttcgtgctgtttttcttaaccataaagccacctcactgctcaaatatattcctgattgtaatgatttaaaaaccatacaatttcttatagatcaaggcacattaccgaatctttcaattggtaacaaagtttcattctccccttgaacactatagttttattatacttgatactgtataaaaaagaaagagaaaatgtattattgcacaaaaatagacagtcgttttactgactgtctattaattcttaacaaatatatgtcattaaatgttgaaatctttctctgaaagcagaattctgtcggaagaatctgtattctttccaaatactctcttcacaagtttctttgcggaagctttctgtgaatgagcaatcgcatcatccatcacttctttcacttctgctactgttactgcatgatcttctctctgtaaagaatcaatcttactgtacagtgcaagaattcccatctcatcgattctgtaaccattctcctgagcataagtctgtccaaatgttacaagctcatcattaataaagatcggcacttcaagtctggaagtaaattttcttctgaattctctgttggaagaaagaagtctgtccagtggttttctctgctcttcaagaactaccaaaagttctcctgtatcctgctccattgctttgttcagcttggcgagtgttttttcgttcatctgtccggctttttcaatgatcagtgcaccgccgtacaatttacggaaaatgtctccgattctcttcttattcagtgactcacctgtcacaattgcaaccttaccctgacggatatcacgctgcttctgaattgcctttacaacatcaacagcgaggactgtctttccatttcctttatttccaataatcagaaggtttcctgttctggaagttcctttgcggtttgtacagttcttatcctgctcaagtacatctaccagctgctcactcataccacgcacaggtacaaaataagagaagagttttttctgttcctctgtaagtcctgctcttgtaccgattccactctgtgtttcaagatcataacgaccatgtacaataaatcctgtatcagacattgcatctgcaatctcatctaacggtaatggtgatgtcttacctgttgcgatcaattttgcagtctctttacggctcaatggtgtcgtcgcagacatgatatcaattccgtcatcttcatccggaatctctctgtcatccggttcctcactatgcgctggattcacgctgaattcatcttcaaaatttggcacttcttcataagaattcagaccaagaagatcatcatctgaaatcttatcttctgctgtgaaaagatctcttggattaattacttcatcatcctcatcgtcttcttcataaccataggcatccagatcatcatatccttcttcctcaccgaacagatcatcatcagcgtcttcataatcatccggcagatcgtcatcagactcttcataatcatccaacaaatcgtcatctgactcttcataatcatctaaaatatcgtcttcgtcaaactcttctgcatcatcccagtcatacgcatcataatcttcgtactcgtcctcaccgagtctgagatcatccgcaagctctcccatattttcatgtggttcttcttctacctcaagaacttcttctgaacttactgttgcatctacttcttcctcttccggaataacaccttcaatctcatcaatcagtttctgtatctctggtgataaaattggttcttcattatttttattgtccatagtctttcttactgctgctccttctgaatcatcttcatcattgacaacttcagtttctgagatcagttcctccacctcagacaaatcttctgattcatctgtcagatcttctgactcagctgcatctatctcaaaaatttcttcctcttccggttctgctttccctgcttcaaggatttctttctcttccggttctgcttcccctgcttcaaggatttcttcctcttccggttctgcttcttctgcttcaaggatttcttcctcttccggttctgcttcttctacttcaaggatttcttcctcttccggttctgcctcttctacttcaagaacttcttccggttctgcttctcctgcttctatagcaactgcatcttctggaacatcttctgaagtctcctccactgcctgttctataagttcttctgtctccggttctggaatcagttctttcatccctgatggaaccactcgttctttactggcttcctcagctttcttctcttctgtcagttgattcacgatctcaagatcttctacatcctcaattgctgcaatatcctcttccagatctgtcatatccggttcgacttcttctcccggttctgcctgaacttccggtttcgggttgagtaattgctgcagagcttcatctaaccgcatcgtatctccgagtttcttcttgactggttttaccggattcttaccgacaaccggtatggaagcagtatctttgctaagtgttctcttatctccacttgtctctaccgttgccggctgaacttctgactcatcctcggaagcttctataacttctgctgtttctactcctgcttcttccggattttctacttcggcatccggctcttctgccgcttccaaagtaaccgcatccgtgtcaatcacatcggaagtactgtcgttctccatcaccggctgctctgtcaacccgattgatcttgtatctccaagtgcttcggctccttctaacgcagaatctttttcctcgtcttctcctaaataggaagtcagatccggtatttcttctgtctctgaagaaagcttctcatatctgtgatcatatttctgctgctgcgatggtgacaatggcttatactgcatcttcagttccattgccttataaacatacttaccctcgctgaaccaaaggatcaaatcatcacactcttccagacattctgtcatcatacctgcttcgcgataaagcttcgccagttcataagcccactcttcaatatattctgccttcttaaattcctccagagcctcaatctgctgttcgatcggcgctctctgcgctcttaagatctgatatctaaggatatgcctgttcggatctttcggtgcaatctggataaattcgtcataatagtcgattgcttcatctatattctttgtcttaattgcaagagaacataacttatagatcaccttgcggcttccttcagaacggcgatatgcaagattcatcacatcatagctcttctgatactcttttgttttttcataaatatcactgacattcatcagcatccctgcgttacggacacgcttccagtcaatcagatctgctgctgccgctgcttttctgtattctccatcttccataagttccagcatctcttctgtctttaacttatattcatacttatccactgtactcacctcattgtcattgaaatattagttttggtctgaatgtgtccattaggcactagccgatactctttcattattctaccatatgaggtctgtaatgtcaaaaaaatgcaccttcaattccttttgaaagtgcatttttagtgttatttaattgtattattattataattttatattttgtatcggagattattcgcgattctacgttcctgtgagacctttgtcgtctgttattttatcacctgaatgattttcatatccattcaatactttatgtattaaatcttctgtcaagtcattcctgcttttataacaaatctgagattataacatgtcctttcaatgtttctttacacatttttcattctatgttatatgcggtatttttattcaatacatctatgagtgattcatctttttctctttgcttccagtttccgtactctccgatctttgatcttcttttctttctactggacttttacgcttggcaaaggtctctttcttcacaggaaccttcactcatcataccactgacatattgataaaaatctgaaactatactgtccatgggactgacctcctgttgaacttgtatttttaatctaatcaggcatctgttacttttgccttcttagttaaatatctttgggagatttctttctctctttgatggttatataataacattcggcgtctaatttgtcaatatattcatttgatttttttatattttttatttattatctacttcggttgtaattatctgaattttcaaacattttgattaacagatttctgctccagccggcatttctttttccggtgtcatcagtgcaaggttaccttctgcatcttctgcacaaagcagcattccctctgaaagtacgcctgccagcttcgcaggtttcaggtttacaagaaccataactttcttaccaaccatttcttccggtgtgtaatgtgctttgattccggatacgatctgttttacctggcttccaacttttacctgagagcagagaagctttttggatttctttacagcctcacatgcaatgatctctccaacctggaactgcattgctccgaactgctcaaatgtgatctcatctttcggctcaatgtcgataacagcttcttcctctttcttttcttctaccttcggatgaagttcttcaactttcttcataacctcttcgagatccattcgctggaacaggatctccggtttctctgttacatgtccgttaccaagctgctcaaggatcttcttacttgtagaaggcataaaagattcaagaagtcttgcaccttcagaaatgctctggatcagattccaaagtactgtagaaaggcgatccttcttggattcatcttttccgagtacccaaggagttgtctcatcaatatatttattgcagcgtttgaacagattgaagatttctgtaatcgcatcggcaacgcggaggtctgccatcttagcatcaactgctttagaagcattctctacaactgctttcagttctgcatctacatcttctacaacacccttatcttctactgttccgccgaaatatttgtttgtcatagaaacagttctgtttacaaggtttccaagtgtatttgcaagatcagaattcaaacgctctaccatcagctcccaggaaataacaccgtcattctcgaatggcatttcatgcagtacaaagtaacgaactgcatctacgccaaagaaatcaacgagttcatctgcatagagaacatttcctttagacttactcatcttaccgtctccctgaagcagccacggatgtccaaacacctgtttcggaagtggaagatcaagtgccataaggaagattggccagtaaattgtatggaaacggatgatatcttttccgatcagatgaaggtctgccggccacagcttgttgaactgctctgtactgtttccgtctgcatcatatccaattcctgtgatatagtttgtaagagcatcaagccatacatatacaacgtgctttggatcgaaatctaccggaattccccacttgaaggatgttctggatacacacagatcctgaagtcccggaagaaggaagttgttcatcatctcgttcttacgggcaaccggctgaatgaactccgggtgtgtattgatatgctcgatcagacgatctgcatatttgctcattttgaagaaatatgcctcttcttttgcaggctgaaccgggcgtccacagtcaggacattttccatctacaagctgagactctgtgaagaaagactcacatggtgtacagtacattccttcataatgtcccttgtaaatatctcccttgtcgtaaagtttcttgaaaatcttcttaacctgtttctcatgatcttcatctgttgtacggatgaatttgtcataagatgtatccatcagatcccagattcttttgatttctgttgatacattatctacgaattcctttggtgtgattccagcctcctcggctttgagctcgatcttctgtccgtgctcatctgttcctgtctggaagaatacatcatatccctggcttctcttgtaacgtgcgattgcatctgcaagcacgacctcgtatgtgtttccgatatgcggtttacctgatgtataggcgatcgctgttgttatataatattttggtttttctgacatttgtctgcctccttttcccacaatgtgggattcttttctcaaattccagtgactactattacgactttctgctggatctttcgcgaaaaaagaatgtgccaaggcacattcttgcacttgcggcggtcgcttgcgacacctactttgtacgccgcagcgcatatccctagcggagcgtttttaatatattaggaaagaacctaatatattaaaaaacgccctcccagagacttgcatccctgagaagacgaatcctacttccgtgttaccacttctcttcgttccttcctcgcggaaagaaacctctatgagtatctgcactttcgttagtaaaaactgctttgttaatcaaaaccactttgaatactacggcatttctcactgttgatactcttcgctataaagggcgaatcccttcacagactaacccggatctttttattcaagatcgctgcttaaacaactcacttgatcactctgttcaggctcatctgcgctgctcagaagccatcttcatctgtcttccatccatccctctcaacatccggcctgacagccttcaggacttttctgtagaatctgttacagactactctcttcctcatcgcgtttcgcttatcactgcttttcattccttaaaaagggtagcataacgcgaatagaatgtcaagatacaccgcttgatgatttctctgctaattcctctgttaccccggcagcatttccttttgctttcactcttggaaatgtaatatctacccggaacaaatctccgtccagatacagatcaaatgtacctccctgcattgttgtaaggctcttcgctatagaaagtcctaatccacttccctccgtacttctggaaatatctccgcggataaaacgttctgtcagttcgtcagcctgaatattcaactgatgctcggaaacatttttcaatgaaaatcttacctttgtatcatctgttttcaaagtcgcataaactctggttccaggcattgcgtacttggctgcatttccgtaaatattttccaagacacgccacattcttctaccatcaacatgcacaacagccggttctgccggaagatctgtgacgattgccagatttctcgcctcgaatttttcttcgagttcaccctgcgtctgctggatcatttctgacagatcaagatccatatattccagggaaatattcccgctgctgactttcgatgcttctactacatcttctgtcaatgtcttcagtctctgtgctttctcttccagaatattcagataatcctgaactttcggatccgctggatctgtttgtcttaagatgccgacatagttcaaaatagaggtcagtggtgtcttaatatcatgagaaacatttgtgatcaaatctgtcttaagacgttcgttttttattgcctcggcaactgctttgttaagtccggttccgatcccgttgatcatcaatgcaaatttcttgttctccccatgcagtccgtcgattggaatctgataactcatatttccggcagcgatctcctgaattccttttctcaatcgattcttctccatcacatttgcaaccatgtaatagaatagcactgcatcagcaatcagcagcagaatcaccaggaagaaatctccaccccagagcacgaaaagctgaaacaggaaataaagaatcaaaagtcctgctgttttctttgtaagcttcatgtctcgtaatattttcccgataaatataccgaagcttcgaagcagactgttctcccacagactctttgccttaattcttcttaccagactaagatagccggcaaaaaagcaggtaaatgtaaatgttccatatgcaaacgcacctactgattctccgagacttaaagtctgcatatatacattcggaacataggatgatggaataaatgtatcactttccacagcaccgtatgaactactcaaccctgtaattccatcaaataagatatgaattccatcgattcctgctacaaaaaagaaataacttccaatcacccagacaaaaataacaactgcagcagcaatctctgtcttccaggaatcgaactttaacaaatgcagttcttcatcctgcggttttcttccggcacccaatgtcagccacactactgtgatcaaaaaaagtacgctgctgaaaatcataaaatataatgccgctttcatatgcggaatgttattttgatattcgatgctactctggtaaaactgatcctggatcggatagtttatgtccactgcaactgcaaaaacatctttccactttgttccgccggaatagtaaccataagaacgtgtattgagccattgatccgaataagaaacgttcatattcgtcttaaaatctttcaattcaggatagattaccatatatttcacagggttctttgacgctgattctatcatgtcttctatgcttttctttacatctgcataatttgcatattctgctttatttgtagtaaccttctttgtcgattcatctgcatacagataggtaaaattggtattcccttcttccagataattccaaccgccttcataatcctgccagtcttcatagattgtttgcaatactgtggcaatattatcataaaccaatgtcagtcttccatttaactgcggattattatttacaacctggagtagattatccgctccgaccggtgcatatttttcaatcattgcctgaccaaagttccagcagtctgtataaagcagctcaccgttttcatctgtaatctgaaatgtataatagccggaagtcgtaaattcgcccgcctgcaatcctgccagaaactgatctctgtcctgctcgcccatctgaaactgaagttttcctgcatttacaagagaaaagaaatcattcatataatagtaataataatttccgtccggtttctgacagacgatcacgccattctgtttgtaaagattgtcgttatctgtcccactgtaagtctcgccccagttcaccagttcctccatggtgtacgtgacacctgacaaatttgtttctgaaatcttgcccttctttgacagttccattacatccaccagtttttttggattgtaggcgccgtcactttcaaaaagattctgcagataaagcttctcctgtacatcgtacatgtaactttcgaccatcttgctgaattcttcggattcttcaaaagactgtgtattcatcttttgaatctgtgacaaactcattcctcccgccagtgtcaggagagaaagcaaatttgtcacaagcaatgctccgctaagaatcgccacaacaagaacgattgtccttgtcacggtcttcctgtaccatttcttcattgttaacccttccttatatgccttcttatgcatttttctatgttctcttatatgctttttctatccatttttacatgtgcttttgttactgttcgcactatgctttttcgattttatatccgacaccccagactactttcaggtaacgtggatctttcggattgatctctattttttctctgatatgacgaatgtgaactgcaactgtgttatccgcaccaattgcctcttcattccagatggattcgtaaatctgattgattgaaaatacttttccctgattcttcatcagaagcaaaagaatattgtattcaattggtgtcagtttcacaaattctccgtctactgttacctgcttgagatcatcattgatctgaaggccacctaccttataaatcgtctcttttggctcctgtgctgttccgccaagctcgttaaatcgtctcagctgtgatttcactcgtgccacaagttccagcggattgaacggctttgttacataatcatccgcaccgatattgagtccaagaatcttatcggtatcttctgacttcgcagacaagataatgattggcagactgttcttctcgcggatcttcaatgttgcacgaattccgtcaagtctcggcatcatgacatcaatgatcagaagattcacttcctctttctccagaatctccagtgcttcgattccgtcatatgcttttaaaatctgatatccctcctgagaaagataaatttcgattgcttctacgatttctctatcgtcatcacatactaatattttatacattttacatacccctcgataattgctgacaccaataacagcgcagcaacataattatcacatgatcaagttctaactatagtatacatgatacttgatggtttttaagagatagattggaaaaatattaggaatttcttaaatcgacgatttaacaatttaaatactttctatttcttgcacatcttttgccaacgttttataataagaaaccgtgagccactttagagcataagtgtagctgcacaaaaatgattgcatttagtactagaatctcttagtatagctgcaatccatcaataaaaaggagtataaattaagaatgattgaatttttaaaatccttcctctttggaattgtggaaggaatcacagaatggctgccgatcagcagcaccggacatctgatccttttgaatcagtttgtgaaattaaatgtttccgaagaattctacagtatgttcgaagttgtgatccagctaggtgcgattcttgccgttgtcatcttattctggaaccagatcttcccgtttggtgcaccggaaggaagtcacacggtcagacgccgccaggcaaagcatgcacatagaaaaaagaaatccggaaacggaattttaagttatgtgaagatggatatcattatcctctggctgaaagtccttgttgcatgtatccctgcaattgtgattggaatgccgttcaatgatctgtttgagaaatggttttacaattacccttgcgttgcgattgctctgattgtcttcggtatcgcatttatcattgttgagaataatcacaagggcaaacctgcgaagatcaacagtatggatgaacttacttataagactgcatttttgatcggacttttccagctgattgctgcaatcttccctggaacatccagatccggtgcaacaattgtcggtgctttgatccttggagtatccagaaccgttgctgctgaattcactttcgtacttgcgattccggttatgttcggtgcaagtcttctgaagcttgtgaagtttggtctgaactttaccggaacagaagcaataattcttctgattggtatggtaacagcatttgtttcttctattatcgttattcaattcctgatgggatatattaagaaacatgatttcaaagtatttggatattacagaatcgtgcttggtattcttgtgatactgtatgcgttgtttttagcgtaagatttattgatattttaaaaactcccaatagaattccatctcagatatcttttagagtatgattttctattgggagttttttattggagttcaattatacttgtttctcttgaaaaaatcctttcaatgccggatacaatttcttaaattcctgatatctttcctcgtacttctgcaccagttccggatccggttcttctgttcctgttactttcacaagtttcttcgcagcctcttccaccgaatcaaatacgccgcatccaactgctgccaggattgccgctccatagcccggaccttcttcgctttcgatcagatctactttcatattcatcacatttgcaatgatctttctccacagcggactctttgctccaccgccgcagatctttgttctctctggattcacaccaatacttcttgcaacttccaaagaatcacgcagtccgaatgcaacaccttccagcacagcctgtgtcatatcctctcttgtgctgtccatagacattccgataaatgctgctcttgcggaagggtcattatgaggagaacgctctcccatcagatatggaagatagaacacatggttctcgccgagccttgtgattcctgcctgttctgccggataatcttttgtcttaaggatttcatccatccaccatttattacaggaagcagcactgagcatgcatcccatcagatgataattgccatctgcatggtcaaaggaatgcagtgcattgttcttatctactccgaatttcttactggaaataaagagtgttcctgatgttccgagagaaatattgcagccaccgtctccgaccgttgctgttcctactgctgccgccgcattgtccccggctcctgcaattacttttacatcatctgatacgccaagttccgctgcaatctctgctttcaaagttccaacgacttcccagctttcatacagctttggaagctgtacctctgtaataccacagatctcaagcatttctgcagaccagcacttatgctccacatccagaagcagcattccggaagcatctgaatactctgtgcaaaaagaacctgacagacggtatgcaaggtaatcctttggaagcataatcttcgcaatctttgcaaaattctccggttcattttccttcatccagagaatcttcggtgctgtaaatccggcaaatgcaatatttgctgtatactctgaaagcttctcttttccaatcacctgattcaggtaatcggtctgttttgcagtacgtccgtcgttccacagaattgccggacgaatcacctggtcttccttatcaagcgcaacaagaccgtgcatctgacctccaaaactgattccctttacttgatccttatcaaagccttcaagaagctctttcagcccttccatactctgtgcaaaccagtcttccggtttctgctctgaccatcccggatgtgggaaatataacggatattcttttgatacgatattcttgatctttccattctcatccatcagaagaagttttactgcggatgttccaagatctactcctacaaataacatgtcgttcctcctgtataaagacagagagccttgccgtttccggcacggctctctgcccgttttctatgcttataactttctatgtaattaaccccacggattctctgttggatatcttacacccttcggctggttgtatccgatctcttcaaccggcacaccaatgtatttaaatacttcgaacaatgcttttccaaagtgtccgaaagcaactgctccgtgatgtggataattcttttcgatcagtacgtgacggtagaatcttcccatctccggaattgcgaacactccgatagatccgaaagattttgtagcaaccggaagtacttctccctgtgcaacataagcacgaagtacattgtcagatgtactctgcagtctgtagaatgtgatgtctccaggtttgatatctccttccagtgttccctgtgtaacctcgattggaagagatcttgccatgatcatctgatatttcatttcgcagaaagcaagtttgccggaagctgtatttccacaatggaatcccataaatgtatctttctgtgtatatgggaattttccttcgatgctctctttgtacatatctaccggtactgtattgttgatatcaagaagtgttactgcatcctggctgacagcagttccgatgaactcgctgagtgctccgtaaatatcaacctcacaggataccgggattccctgtgctgtcagacggctgtttacataacatggaacaaatccgaactgtgtctggaatgccggccagcattttcctgcgattgcaacgtattttctatatcctctgtgctcctcgatccagtctttcaaagtaacctcatactgagccagtttcggaagaatctccggtttcttatttcctgctccgagctcttcttccatctcttttacaacggccggaattctctcatcaccttcatgtttgttataggcctcgaaaaggtcaagttcagagttttcctcaatttcaactccgatattgtaaagctgctggattggtgcattacatgcaaggaagtttaacggacgcggtccaaagctgatgatctttaggtcacttaatccgataactgctctcgcgattggttcgaactcatgaatcatatcagcacattcctctgctgttcctaccggatactccggaatgtaagcttttactcctctgagtttcagattgtagcttgcgttaagcattccgcaataagcatctccacgtccctgtgtcagattatcctgtgtctcctctgcagctgcgacaaacatcttcggtccgtcaaaatgttttgcaagcagtgtctcagaaatctctggtccgaagtttccaagataaacaaccagtgcgttacatcctgctttctttacatcttccagagcctgcaccatgtggatctcgctctctacaatacagatcggacattcatagacagttccttcaccgtatttttttgtataagcatcgatcaatgcttttcttctgttcacggaaagactctccgggaaacaatctctgctcactgctacaacaccgatttttaattctggcatattactcataataaaatcctcgctttctttatacttgttattatttctatctttctcatgttacgttatccacacttttcctgtaatttcatttggttttccacacatcatgcagaaaccttgtgaataacacgatcctgatttggggaaaccccggcatccattttcaatcagacttcgacgttctcaccttttaacccacagaacgcaccttcaatctgtgcatcctcatgcgcgatcagccatttattcatcgctgcaagaagtctgttttctccctctttcgctgtttcaaatggaagcgcttcattcgttcctttcggaagaactactacacagcggaatccaccttcctgtgcagtacacggtgcataatgaagtgttgttgcatacagttctacaccggttcccgccggaacaaggaatgcttctactttggctgtatcatagatatcaccgtcttcaatatcctgttgcattccaagaagcagaattaaatctgtctgtgcgatatcaagttccgagcttctgtgatattctaatgcattcagtttgtgattatctccattacagtatccgatctggattggcagtccgccgaatcctttcttgcagatttcagctgcttccggaagtacttccaattcctcaacagacggtacgtagacaacatctttcggaagtggtgtgtgttccatctcttttaagatcttctcaaaagagtattccgtgatgatcttgccgtattttcggaaagatgcatctgttacattctggattttcatgatgtccccctgaattttcttctgtttcttgtttcgtttgtttctatggtcattttaccaacttaaaaaggcattatcgaccaaataattaaccaaataatgcccatttcttatcttttctttctgaaagtgaaatgtacactaatataatgttgtaaactttgccggaggattaaaatctgtattatacattctagccgcatgcgcacatttgtttcgtaaaaccgataaacaatgaagaggattttctagtgtatctcttccaacaccaaccatatgagcaatagcatcttcggcacactaaatttcagtatccgcgttgtacacagtaaccagtctcagcgcaataaagaccgcgcaagactagacacaatcttagattatatcgcacagaattaccgccacatcagcattgaagagattgccggaattgcttatctgcagcctggatacttctgccgttttttcaaaaaatgtatgggaatcacttttttagaatatcaaaatgaattaagactttcctttatttatcaggatattatttctacagatgattccatcaaagatatcctggaaagacatggatttaccaattataaattgttccgtcgaatgttctttgaacattttaaggcttcgcctactgaggttcgaaagacgcatgatacgaagaaaaactcctaatatttagggattattcttttatattaccccttatatttagggattttatgtgttatactataaacagaattatattggaggtgaaattatggagtttgcaattcaacatacattatcttcgaaagacataaaactaatgcgaaagcgtcttggacttaagcaaaaagactttgccgccttattaaatgtctcagtaaaaacagttgaacgttgggaagaagcagatgttaccgtaaccggtcccgctgtaacattattaaagattctatatgaaacacctgaatgggttgaagaattacaaattccaacgaaaatttatcctcttagactattttattactataaagaaagtctgtgtactgtaattgatgtaaacgaaccctcccgaaaaatagcaattaaaaattttgtaaggaatcctattttttgtgcatttggtgtcaataatgctcctacattcagagattatgaagaatttcttgaatcaagatgctttccacgaagcagggataaaatgaagattatattacgtgatctcggactgcctttttatgatccattcctgattattcagaaaaccaaggggaaaatggctgaggatgatttttggatagaaatcgaacgataggtaacttgaacgctggaaggaggtaagatagagtgattgaattaaatataaatgatatgaaagatactgaacgtcattcttcaaagggaaatcaattaaaatggaaccctgcgaatactgaaacctggtataaggcagattatattggttatgaaggtttaacagaatatatggtttctcacttattaatgcattccactctttctacaaaggatttcgtcttatatgacacagaaatacttcgtgttggaaaaaaagactatttaggatgtaaaagttcaaattttcttcctgatggctggcaattattaacactagaacgactttttcatacacttcacggaaaaagtctttatcaatctatttttcagtttggagaagtagaagatcgagcacaatttctcgtagatcaggtaatacaaatgactggactaaaagattttgggaaatacctttgtactttgctcactattgatgcattatttttaaatgaagatcgacatatgcataatattggagtcttacttgatccacttggaatttaccattactgtcctgtttttgataatggatgttctttactctcagatacaactactgattatccacttgaagaagatattattgatctaattccacaagtccaggcaaaaacactctctacggatttcttagagcagttagatgctgttgaaaaattatatggtcaaaaattacatttcgatttcaatggacaaataatagaaacgcttttaagagaagaaaaattttattcaacagatataaaaataagagttcgcgacattatattacaacaaagaagatcttaccagtatttattttcataagcaaaaaaggaagcgaaccgcttccttttttaccctctcatcctattccacgtcccattattccttcggtggcaggaatcccttacttgtcttcacgatcactttatcaaataccatgaacatagacggtagtacgaagattacaactaccatactaatcagtgctcctctcgccatcaggatacacaaggaactgatcatatcaatgttggagtaaagtcctacaccgatcgttgctgcgaagaagctcaacgcacttaccatgatagactgtgcggatacgcggtgcgcagttgtgatggaatcgtatttatttgcgccatggttacgctctctcttataacgagttgtcataagaattgcatagtctacggtggatccaagctgaatggttccgattacgatggatgccacgaatggcaacttagttcccatgtagtatggaatacccatattgacgaaaatcgcgaactcaataacgcctaccaggatgatcggcagtgagattgacttgaacagaagcatgatgattacgaaaataattccgattgatactgcacttactgtcttgaagtctttatctgtaatgtcgatcagatctgctgtcagaggaccttctccgatcagcattccaccttcatcatatttatgaagaatcgtattcagttctttgatctgatcattcaattcatctgtagctaccttatattctgagttcgccagtacaagctggtacttatcattctttaatgatcttgtcactgaatccgggatcatgcttgccggtacggacggcccgatcagggagtcaagtccaagtgcccatttgattccgtccaccttatccatctcattcagcatcttgcctacgtccgctgaatctgtagagctgtctacaagaatcatgtgcgtcgtattcatgtcgtaatcttccttcaatttctcatttgcaatgatacttggaagatcttttggaagtgtctcatccaggttatagtaaactcctgtatggttatttccgtaaatagccgggaatagcagaactacgaacagtgccacatagatgagatatctcttagtaaccttgtctgaaattcttccgatatccggaaggaatggtttatgttttgtcttctcaataatcttgtcacaacacaggatcatggatggaaggattgttacgcaggcaagtacaccaaggataacacccttaaccataacaacaccgatatcaagtccaagtgtgaatgacataaagcacagtgcgataaatccggcaattgttgtaacggagcttccgattacagatgaaaatgtctgtgagattgcatgtgccattgcacggtgtttatctccgtcgtaacggatctgctgttcttcgtaactgtgcatcaggaagatcgaatagtccagcgttacacccagctgcagaactgctgccagtgccttcgtgatataggaaatctctcccataaagtagttacttcccaggttatagacaatcgcgattccaatactgagcatgaaaaggatcggtacaaagaacgattccattgtaagaccaagtacgatcatcgccagtacaaccgcgatcaatacatacaacggtgtctctttctccgccagctccttcgtatctgtaacaacagctgacataccacttaaaaagcactgctcgcccgccagagaacggatctcggagattgcttccattgttccgtccgaagatgttccttcatcaaagaagattgccatcatcgttccagtctcggagttaaatgcatcataaacctttgtcggcagcatactcttcggcatactgatatctgcgatagaatcataccagataacctcttttacatgatctaccttctcaatcttctcttttagcttcgatacatccttatcttccattccatcgactataaacatcgagaatgcacctgtaccgaaatcatttaccaaaatatcctggcctttcatcgtctcgatgttatccggcaggtaagtcaatacatcataattaattctcgtatgcagataccccaatgcagacggaatcaataataaaatactaagaatcagaatcggcactctgaattttactatcttttttccaaactttaccatcatatcctttttcgcttccttcctcatattcaatttatgactattggtcattttaatctcttcttgcactatacaataaaaatgactaacagtcaatatattttgtactgttagtcattttttcttttttatttatattccattttcgtaactgttcagagccaacctccaaaatgctacgcattttctttatattcacttggaagaattccgtattttttccgaaatgcccttgccatcgccttgcttccggagaagccgctgcgaagtgctgtctcagtgatattatattttccgcccttcaggtctttcattgcatattccagacgaatattctgcagataactcttgtatgtgattcccgcatatttctgaaacatcctcgacagatacgtcggagaatatccaaagattcttgccacctcttccagacttaattcctgcgcataattctctttcatataagcagtaatcgtcgaaagcttgttcagattcttattctttctgacaaaagcattctccacttctgtcagacggtattctttcacaaggagatataaaagatgataaaaaatactattcatcttcatgtcatatccacactgcttttcgcaatacgtcttatacagttcttccaacaattccataaagcgcgcgtccttacgtcccggttcatgcgtaaaccagataaattgctctcctgtataatatttttcaaaaactttcaacggaatctgaagaacgatcgtctcgtttggcaacggagaatctacttcatgaacctcattcgaattcacaatcataaattctcccgctgtcagatgccaggtcttctcatcgatcttaaattccagttctccgtcgcacactgcaaaaatctcaatcgatctgtgccaatgtttttctctatggtaatgtccttctctgccttcaaataagaatagtttaaaaggaaatccaacttccggaacgatcaattcatgcgcaaactgcatctcttttattcaccacactttaggctttcgtccacttatgtaccgtatctgttcccggactacataattccactgtagatccatcatctgacagtgtatagacatattccagtgttccaccggagataaccagattcagcctcaatgtaccgtctgcattctctgcaacacaatatgttccctttgtttcaccggaggaactcttgatcacaagctttccgtccttctttaatttatattcatttccactgttgtctgtccactttccgatcagccccttcgcacggtcatccgtcagatccagaaggtctgtatccgcctgaaggaacttcatatcctttccaccatccagggacttcaacactatgccatagcctgtatcatctgtcgtaaccgcatacagtttaccttcgtcttcgccgtccattgtgatcttgatcgtaatgttgttatcctcatcaaatccacactcaaatgtcagtccgtcgtcatccttagttcctgttccatcttctttcagatcatacacagtatctgttccaatcaccttccactgctttgccataactctcttaacagaatcacttggaagaaccgcgttgtctcccatctgttctttcatcgtactgcttgctttgtccacctcttctgtcgtagatgcagccggttctgttttcttcgtatcgccgcatcctgtcatacacaatgtgcttgccagaagtaatgctactactaatcttttcatattctctctccagtcttgttactgttcactccgtgtcaatcaacgaagtgattgacacgggagtgaacagtaacccagtcttttctgtctgatcagaaagatagcattccgatcaggacttacagtctttagagtatcacaaacgcactgtaaattccagtaaagttaatacaatttcacggttatttcatttttagacacactcgttttcgtttgttttcaacaaactttaatgcttttgcactgtttcactttacctcgacaacttgtttattttcttaacatatgatacactattcacaatgtaaaattataggtaacttgggaggaaataggttatgattatctctacaagagggcgttatgctctccgagtcatgattgatctgtctcagcaggatccggactcttacacaccgctgaaagagatcgcagcacgtcaggagatttctgaaaagtatttggaaaatattttaaaatctcttgtcacacaaggatttatccttggacttcgcggaaagggcggcggctaccgcctgacaaaatctccggaagaatacactctcgcttcgattcttcatgcgacagaaggaagccttgcagctgtagcgtgtctggaggatcatgcaccggaatgtgcacgtgcgggtcagtgtccgacacgtccgatttgggaaaaactggataaccttatcgaggattatcttggaagtatcacacttgctgactttcatgaaccggccattccatgcaagattgagaaatagcattatttcagggggaacgaaataacagttgtttcaatacaatgggaaatcagatctacatagaaaaagatggataagtaatgcttttattgcttatccatctttttctgtttctattttatctaatcatccgtgaaccttttctttcactgctttttcaatccgatccaacgcttccacaagcgtcgctctctggcaagccacgttgatccgctcaaaaccacttccagactctccgaagatcgctcctccatccagccaaacctctgccttatcttctatcagttcttttagttccttatctgaaagccctaatgcccggaaatccatccagacgagataggtcccttctgtctttgtcaccttgatctgtggtaaatgttctgccatccatgtatgaaggaaatcaatgttcgacttcacatactgtttcatcgcctgataccattcttcgccctgagtatacgcagcgatcagcgcaaagattccgggtgcgccgacctgactatacccggctgcagttacctgatgctgaaattccttgcgaagacttgcatttggaatgataatattggaaatctgaagtccagcaagattgaatgtcttccccggggaagtacatgtcactgtaatgtctttatactcgtccttaagatctacaagcacctgatgcttcccttcaaatacgaagtctgcatgaatctcatcacttacaataatcacctgatgctttaggcaaatgtctcccagacgctccacttcttcccttgtccatacccggctgaccgggttgtgtgggctgcagaataagaataatttcacacccttttccacgatctggcgttcaaaatcttcgaaatcaatcgcataagatccatcttccttacagataaggatattggcggccactttacggtcattgctttcaatcacttcccggaatggataatagaccggatcctggatcagaatataatccccaggttctgtataagccttcaccgccattgccagtgcaaagacaattcccggagtctttgtgatccactccttgtcgatcttccatccgtgacggcattccatccaggagctgaccgcatcgtaatactcctgatctgactctgtatatccataaattccatgctctgcctgacggatcaatgcttcctggacgaaagatgacgtcttaaaatccatatcagcgacccacaacggaagaatatctttttttctccctctttcttctgcaaaatcatacttcagactgtgggttcctcttctctctacaggctggtcaaaattcaaattcttctcactcatttttactccttttattgaaatgcctgttccagatctttgatcagatcttcagcattttcaattccaacagacattctaaggaaatcttctgtgattccaagacgttctcttatctccaccggcacatcaccgtgtgtctgaagcattggatatgtgatcaatgattctacaccgccaaggctctccgcataagagatcaatttcacactttcaagaatctttcttgtacgttccaccgtatctacacggaaagaaagcatacttcctgctcctgtcgcctgcttccggttcacctcgtaacccggatgatcttccagacccggataataaacttctgtcacttccggtctgtttttcagccaaagtgcgatcttcttcgcattctcctgctggcgctccagacgcactgataaagttttgattccgcgaagtacaaggaaactgtcaaacggagacagactacagccaactgtcttatatgtataacgcaatttttccgacagctcttcccctttgacacaaacaaatcctgcgaggacatcattgtgtcctccaagaaattttgttccgctatgtactacaatatcagcacccaactgtagcggtttctggaaataaggagaaaggaatgtattatccgcaagaatcagtaacccgaattcgtctgcgagttttctcatctctgcaaaatctgtaatcctcatcgttggattacttggtgtctcaatataaagtgcctttgtctcttttctgatattctttcttacaagatcaatatctgaagtatctacataagaaaactttaatcctcgcttttcgccaatgctttcaaacattcgcacagttccgccgtacagatcttctgtacataaaatatgatctccttctccgaaaagctccagacagattccaattgccgccattcctgtcgcgcacgcaatactgtcatccgctccttctaaagaggacattacgctttctaattcataccgtgtcggattgctctcacgagaataatcatatcctgtacttttcccaattcccgggtgtgcgaaggttgctgtctgaaaaatgggaacggagactgctccgtatggatgtccctctacaaatcctccgtccccgtgaatacatcgtgtttcaaattgataattttctgccatactgtctgtctctgctccttacgttccactctattaaatatagtacattccctcaacagaatcctgatacccttcgtatgcatccacaagatccttaagcgtcacatcttccagaatctcctgaacacaatcattgattcgatcaatgatcagatgctgaattgcttcctgatctccacgtcccacgttgtttcgatcaacttcatcttccagatcataagttccttccaatgcttctacaatctgcgcaaccgtgatctctttcggatctctctccagaaaatatcctccctgggaacctttcatactttttacaatatgagccttgcgaagagctgaaaatacatgctcaagatactgggcggaaatgtcatttctctgtgcgatacttcctaatgagaccagctctgtccgtgaattcaccgccagatcaataagagcacgcagtccatatctacttttctttgataatttcaaacgcttctactcctttcttctaaacactataggagcagcttttactgctcctacttcttacagatttttctgttttctctgattcttatttactgaattgctttgaatgcctcatccagatcctgaatgatatcatcaatattctctgtaccgatggacagacggattgtgtttggcttgattccctgatcgagaagctcttcctctgtgcactggctgtgtgttgttgttgccgggtggataacaagtgatttcacatccgctacatttgcaagcagtgagaacagttccaggttatcaatgaaatcctgagctttcttagaatcacctttaatctcaaatgtgaagatagaaccaccgccgttcgggaaatatttcttataaagttcctgctgcttcggatccggatctacagatggatgatgtactctctcaacctgtggatgattgttcagatactcaacaaccttcagtgcattttccacatgacgctctacacgaagggaaagtgtctcaagtccctgcaggaagataaaggaactgatcggagaaattgttgctcctgtatctctcaaaaggattgctctgatctttgtaacaaatgcagccggtccgcaagcctttgtaaaactgatgccgtgatagcttgggttcggatctgtcagtgacgggaattttcctgaagcctcccagtcgaacttaccgccctcgatgataactccaccgattgttgttccatgtccaccgatgaactttgtagcagagtgaacaacaatgtcagcaccgtactcgattggtcttacgagataaggtgttgcaaatgtattatctacaacaagcgggattttatgcttatgtgcgatatttgcgattgcttcaatatcaactacatctgagttcgggttaccaagtgtctcgatgtaaacagcttttgtgttctcctggattgcattctcaacttcttccagattgaaaatgtcaacaaatgttgttgtaattccataattcggaagtgtatgctcaagaaggttgaaagatcctccataaatattctttgcagatacgatgtgatctccctgctgagccagattctcaattgtatatgtgattgctgctgctccggatgctactgcaagtgctgctgtacctccttcaagtgctgcaattctcttctcaaacacatcctctgtcgggtttgtcagacgtccgtaaatatttcctgcgtctttcagtccgaaacggtctgctgcatgctggctgttgcggaacacataagaagaagtctggtagatcggtactgctcttgcatctgtcaccggatccggctgctcctggcctacgtgaagttgtaatgtctcaaatttaaattttctgtcttttctctctaattttgccatgggtttattctcctttttctaattcctgttttgtattcttattccgcagccagagctgcttggaagttaaaatcttacttaattaatgccttgctgttgtcttgatattcgtgcctactctgtaaagagtggtgtagagtagtatctgtctccgctatccggaagaagtgctacgattgtcttgcccttgttctccggcttctttgcatatgcgatcgctccggaaagtgctgctcctgaagaaatacctaccaggattccttctgtctttgcaagaagcttcgcggctgcgaatccttcgtcattgtctgctttgtatatctcatcatagatctttgtattaaggacatccggtacgaatcctgctccgattccctgaatcttgtgcggtccgccctttccttctgaaagtaccggggatgctgcaggctcaagtgctacaaccttcacatccggtttctgggacttcagatattcaccaacacctgtcagtgttccacctgtaccaacaccggcgataaagatatcaacatttccatctgtgtctttccagatctccggtcctgttgtctctctgtgtgcttttgagttcgccggattaacgaactgtcccgggataaagctgttcgggatttcctttgcaagctcttcagcttttgcaattgctcccttcattccctttgtaccttctgtaagtacgatctctgctccatatgctttgaggatatttcttcgctcaacactcatggtctctggcatggtaagaattgctctgtaccccttcgctgctgcgattgatgcaagtccgattcctgtgtttccggaagtaggttcgatgataacagaaccttctttcaggattcctttctcttctgcatcttcgatcattgccttcgcaacacgatctttcacacttcctgccggattcagatactcaagctttacaagaatcgttgcttcaagtccaagctctttttccagattcacaggttcaacaagtggtgtgtttccaatcagtccaagtgtgcctttataaattgccgccatagtctatatcctcactttctttattaacctacttagtcggtgtgtttttgatggtttgtattatatacttataaaacccatctgtcaactatgttttaatatttttctacattttttattatacaatatcgatcggagatgtaaatgatcaaaaaatgcaaaaaaaatccgctactaataacatatactgtttcattttcactgccccgaaaagagaggtgtcctgtatgcgtaaatgtgttaaaaagaccgatgccccgccctctcagacgaacccatcggtcttttcttctaatccttatatcttctgtcggattttattcctagaactccgcaatcacagtctcaccctgtactgcatccattcctgtatgtaacttcatatccggatattcatctccgtttgtgacaacaaaaatacaggttgtctcatatccgtgtgctttgatcttctccgaatcgaactgaaggagcttatctcctgcattgaccttctgtccttcttttacgaagtacttgaagccttctccttccatatttaccgtgtcgattccctcgtggatcagaatctctgctccgttggaaagtgtaagacctactgcgtgtttggatccttccatcagtgctgaaactgttcctgcacatggagctacgatcacattgccttccggctcgattccaagtccgtcacctaacgccttggaagagaatacctcatcctttacttcatcgattgggattacctttcctgacagataagctgtcagaactggtgtcttattctcttctaccggtgcttctttcttcttaaaaaatgaaaacatacttactttctacctttctttttcataaacattgtccattcgttgcgattacgttcttataccaatcgaaggaatctttcttttctcttgagaggtccccggttccatcatcaaatttattgacgtagataaatccatatctttttgccatttcgccggttgatgcagagaccagatcaatgcatccccacggcgtataacccatcagatccaccccatcttctgttgcctcatacatagcttcaatatgtcttctcagatagtcaattcggtaactgtcatgaatctgtccatcctctgccttttcatctcttgcaccaagtccattttccacaaccatgattggtattctataacgttcataaatctcattcaaagaataccttagtccatccggatcaatctgccagccccagtcggaggcctgcagatacggattcttcgctccacctgccagattgccttccactgttgcttctccctcatgcgttgtaatacaggaagacatataataagagcaagtataaaaatccacagttcctctttttaatatttctttctcttcttcactgatttccagacagattccctgctctttaaaataacgtttcatataagacggatactctccccggatctgcacatctgaacagaaccagttaatcacatgattgtgtttctgcgcagccagcacatcttccggatcacaagtcagcggatacgccgtcagaaatacattcatatcccccatttgaaattgcggataatgctcatgtgcatatgcaactacctttgcggaagccaataactggtgatgcagtgcctcaaaccgaacctgtggacttaccggtgcgtctgcaaccggtccttcatatcctctcaccgtactaagagacagggttgtaccaagaggagttacacctccattgatctcattaaaggtaagccagtatttcaccagattctgatagcggtcaaaaactgtataacaatatttttcaaacaacgcaatgacattccggtcagcccatccgttatatttctctaccagtgcatatggcatctcataatggctcaaagttaccagtggttcaatcccgtatttcttacattctttaaaaacattttcatagaagacaagccccttttcgttcggctcttcttccattcctgttggataaatccgcgtccagttgatcgatgttctgaaaactctgaatcccatctccgcaaaaagggcaatatcctctttgtaatgatgataaaaatcaattgcctcatgacttggataaaatctgttttctcttatctctgtcgtaatacattttggattccgctttgttccattcgtgcacagatccggaactgatattccctttccatccacgttccaagctccttcaaactggtttgctgcacatgctcctccccacaaaaaatcttttctaaatgccatatctgctccttatttattcttgctttttactttctttaattgaatatgctttttcttgtgtctcttttttattactttcaaaatcaagctgatatagaaatgagaacatacaatccagaataaagtgaaatgcgctgtataccgcaaaggtatcaatcttctcttcataagatccctgttcctggacatccaccagaatcacttcctgacacatcctcgccactgtactttccggtgtcactgtaataccaacgcaatacctcttcttctttttcagaagcttcagactttctaccacatccctgttctcgccagattgcgaaattatcagatttacagtatgttctgaccctgccagtgcatatcccggaagaaaacaggaactcattgtcagatttacgatttttccaaaacgtaacattttctgctgaaattccatcgccaccgtagcagatgttccaacactgaaaatattgatcatatctgcacggctcatccgacggacaattctctgaaactgattataatcaaatcccgacattgctttattgatcgtgtcatgattcagcttcgcgagctttcttgcaatctgctcaaaagaatcgcttcctgagaatgggtaattcgcatctactgccccctgacttgcatatacctcatactctgaataaaacagaatctgaaactttttatatccgtctaatccaagtttcttacagaatctggtgattgttgacggcgaagtaaatgtctcatgtgctaatgtctgaattgacatgttctttacatcaaatccgttcttcatcagataatctgctatgctcttctcaacctttgtgaagtctgtctgtttcatcagtttttctataatcataataactccccttctcctgatttcttccgaaaataaaacctacatttattttaacaaagaagatctcagaaaaaaaggggagatgcattgccatactaactaattatattcttttactttaccgctctttaagaggaacgctgtgattccaaatccaagtgcgattgctacaacaattcccacacaatacatcgggaagttgacacatccaagccagccactgaatgccagaattccggtaaaggcaaagttcgttgctgccacaccaccgattccaaacacgagtcccgctgctgcaccagaaaagaccattgttccaagaagccatttacttcgcagaataattccataaagtcccggctctgtaataccacaaagagcatttgtaaatgcagcagatcctgctgttgctttatctccactgttcttggcaaatactgcaactgcaaggcagattccaagtgcagcgtaaccgcccagtccacctgctgccagtgccggttcaaatccctgctctgccataactccaagaaggattggtgttactgcccagtgcataccaagaagaattaccagtgagaataagccaccaaacacaatgcctacaagaattctatttgcacttatgacaccataaacagcattgatgccatttgcaataaatccgcctgccggtccaaacacaagaatgctgagtggaacgaatacgatcaggcacaggaacggaacaagaataaactgtgtcacctgtggcagaatctttttcaaccatttttcaaaataactcatgcagaatactgcaagcaggatcgggataaatgatccactgaaattatatgctgtaaacttaataccaagcagtgatgctttttcacctgttacaagaagatctgcaactcccgggtacatgatggatgctccaagtgtcaccgctacataaggattacatttaaaatgctttcctgctgtaaatgcaagcagaatcgggaagaaatagatcagtgagtaaaaaattgcataaaatgtctggtaagtaagacttgcactgtccactactccaagattggcaagcagtccgatcagaccggatgcaataccacctgttgcaaggattggaatatatggtgcataaacgtcagacatcattttggaaaatctgtccagcagccctgccttcttttcagattcatttcctgcatcctgctttgtctcttttgctatgttcttcagttccggtgtctccataagctgcgcgtaaacatcatttacctgtggtccgatcagaacctgataataaccggaacttacaagcgctccaagtaccccttgggtttctttcaatgctttctgatcaaactttgttccgtctttcaatgtaaaacgaagtcttgttgcacagtggatgcagttttcaatgttttctgccccaccaactccggcgatcactgactggattaattctgaataatctttcatttgtgttcccctttctttttctcttttccttcttctaaatatttaatgctgctgtatatccctcaaaattagcattcataatattagacgggctgacacagtccccaattgctactgtatccctgcagattccataaaaggattctacaagctgtctctgtgccacaagtcctgttgagaggatcaactggtcatatggaagctgcttttcttccccagattcatttttatagatgacaacatcctcttcaatcctgctgcatccacattttaacagactgtgaagattttcatgcagtaaaaatttctgtctcaacgcttctctgtacagagaatttgcattcgcagcaagcgtatctgttaattcaagaattgtaacattcttcccattttctgcaagttcaagtccgatttcacatccaatacttccaccgcccagaattacaatattctgaccaagctgctccggatgtgcgattgcttttgtcgcaagctgtactttttcaccttccacacctgggattggaagaattctctccactgccccaaatgcaataagaagtgaatccggctgcaattcttttaccagttccggatctgcttccgtattcagaaggacttctatttctcttttgaaaatctgtgtcagataataatctaacagtctctgaacttcctctttatgtgcttcttttgaaataaaccggagcattcctcccaattctttctgtttctcaatgattgttactttatgtccccggtcacttgctgtaattgcagctttcattcccgccggaccacctccaagaattacaacatgtttttttgtctccgcctttggaagattgatttcagacggaacaaattcctgatggtgataccgcggatttacagaacagcctacattccagtgatccgaagaaatatgataacagttcgagcatctgagacacggaacaatatcttccggatgtccttccattgctttcttcggccagtatggatccgcaagaagcgttcttccaaaagccaccatatctacataacctttggaaatgatttcatctgccatggcaggtgtcatcaccgcactgacaacagacaccggaatctgtaactcagcctttgcctgttttgcccatttcagattcggcatttcttcttcaagatttgttgtaatacaatggacatttgcctcaaaaatcttgtcaataccagaagaaatctgaaccgtatcaatataaggttccgctttctttaaaaagtacattacatcctcaaagcttatagaatcttcaatccattcatatgcactgattctgatatcgattggataattgttccctactgcttttctcactgtctccagaatccgaagtgggaaacgacttctgttttcaatactccccccataaatatctgtgcgatgattataatgtggggaaagaaactgtgccggcagccatccatgtccaaaatgaagaaaaatcgaatcaaatcctatcttcttcgcacttgctgctgtttctgcataccagcggagcgtctcctccatcatttcttcatccatctcttttacttcaaccccatccggacggatcagtgcagatggtccctttgcataatccacagttctggcatcctgacctgcatgaaatatttcaacggaggcctttgccccacctctgtgaatcttaagcacttttttccttgtctcttctctttcgtatttagcaaacgggtatggctcttccggacttgcgaaactggatcttccaggttccacgattgcatgtcctgcaatcacaagtgccgccccacccattgccttttcttcgaaatcatcacctgtcggtgttgctatgatcctgttcttcagaatcattccattcacagaaatcggtttaaataaatgatcaaacacttctcttctcctttccttgtctcttttggaatacactcatcttaaagcactcttctgtgatacacaacctgtcagaaaaggatagaaaataattttcacaaactctcttattttcatatctatttatgaaatttattcacttttttctgctattcattgataaaatcatgattttacacaaaagaaagtcaggtactctgaatttgaatcctgaattcagaatacctgactttttcttcaattttccaaaagccaatctattacattaattacttttataccatcataatttccaagcgaaaattgatccagtgttaaaacaattttttcataattgtctttaatctcctgtaatggtctcatttctctttcaaaagtttcttctgctgtcatatctgccgtcacctgataataaacgattaccccttgtttttgagcaacaaaatctacttctgtagctccatatttacctatattcaccttattcccacggcgcaataattcaaaaaaaacaatattttcaatagaaaatccaagatcataacgctttcttggcaaaatgtgattgcgaagccccaaatcaaccatatacaacttcttattaacttttaacagctgttttcctactatatcaaatctatctactgaataaaatataaatgattctgtcaacgcatctacataatcactcaccgtattcgcagatacttttctacctgatgaaatcaaataatttgtaatactttttatagaaattgggcttccgatcacacttgccagatatcgcgcaattgtcttcaacaatgtaatgtctgtgatttttcgcttgccacaattcatctcttttcttgactgacgatcttcaatatctcttacaatcaccgtattataaataccttccagatagatctccactttttcatctgttctgtccatcactgcaatgtagggaaatccaccggttttcatatattctgaaaatgcctgttcttttagaattcctgtaatttcaacatattctttaaaggagagcggtaacatagaaatttcaacatatcttcctgttaatagtgtagccaaatcccctgaaagcatatatgcattagaacctgtaatataaatatcaatattttcttttacatgaagactatctaccactttttcaaaggatgttaccttctgaatctcatccagaaaaatataagtcatcttgtcttcgcaaagtcgttctttaatatattgatataatgacttgtagtccaacaatggctcattttctaattcttcaaaattaattgatataatttgttcttctgtaaccccagctgattttagtttattctgatattgttttaataatgttgattttccacagcgcctgattccagttacaaccttgatcacctgctcgtctttccatgaccatagcttttgtaaatattccttacgttcgaccatacagcgtccctccctttttccaagtatagcatactatatgctctttttcaaaaaatattcccatttcggagtttatttttttattctcaaaaaaagattcctatttgggaatctttttctatgtcgtctctcgctcaatcaacttcgttccaaacaccatatgctgcacgcttggtttctcatcatccgccgcttcaatatcttctaatatcatatccgctgccctctgtcccatctcacgacccggcagctccatggaagtcatcgctgtctcaagcattcctccgattgcatgaccggtaaggctgatgaccttgacttccttcggcactttctttccgctctctttcagtgcccggagtactccgattccctgcatatccgcagcaaccatgattccatctacttcatcaaatgcctctttgagccgctccacacctttataaccatctttgaaataatttccgcgcggcaatccggactctacctgatattccttcaggccaagttctttcattgccttgtggtatcctctgtaacgttccgcatacggggtaaactctgttgatccattgataaaaccaatctttgtacaccccttcttataaagatactttgccgcttcatatccgcaagagaaacagtcggcttctaccgaactgaatttcctgtcctgatttctaacaagttggacaactgccactccatttgccttgatatcacggatcagtcttgtgttctgtccggtcgatgcgatcaggattccgtctaccagtccattacgaagacggttcagacattctgcttcaatatccggatcatccttcgtcaaacagatcatcagactgtaacctctattgcctgcctgcatctcgatcccctggacgatctcaccaaaaattgaaagatttacagatggtacaactactccaagcgtccgtctcttcccctgtttcaaacctttcgccagcagatttgggcgatagcttaactgctctaccgctttaaatattttctttttcgtatccggatgaacatacgacgtgttgttcaatgctctggataccgtactcacatctacgttcgcaagctttgcaacatcctttaatgtagccataacatctcttcctcctgtgcatctgttctgttcgtgcaattaatttacgctctttctattataacatgccacaaaagcctggcaaccatctcatcatgataatcaccagacttttcattcttatctataagaccgtagaagcggacacatacttcctgatctttatgaaaatgaagcaatcagcttcggaatataatttgcaagtgcagagactgtcattgctaatgtaaagagataactgactgtcataagaacctgcagtactcttggtgccttcaatccagcctgaacttctttcttccagaacatcaatgtgatgaaaagacctgcaaccggagttgcgattgatgttgcgatgttagcaatgaagatcagctgtgtcggagaaccgtcgtagatgaagcagactacacatgcaaatgcaagtgtgatcatacatccccagcggatcagcttggactcaagtgcaacgtctttgtcgaatcctgcacttaaaagtaccatacctctctgcgtattaccgagaagtgaagagaatcctgctccgagaagtgcaactcccattacaatgttagaagcttttccaaggaaaggaacaagaagcgctgccaactgtgccggtgctttaatctgaattccctgtggattcagaacgattgctccaaccagcatgattgctccggaaatcaggataactgatacaatatgtgcgattgcatcccatttcattgctccgttaaataaatcctcttttttccactttttctcagcaccgagatatgttccatagattcctgctgtcacagctgcatttgtactgatataagcaagtgctgttgtaagacttccttccggtacactccagtgtgttaatccatgtcccattgcaccccagtcaggtccgccggttgcaaccagtgttgcatagaaagcaaatatcatagcaatgatacaaactaaaattcctttttctacttttgaataaacaccttttgaaaagtaaagcactgtaagtactgccaacatgatcagtgctcctaatttccagttgattccaaatacaaggttcatacctgcacctgttccggaaatatttccaagtgtaaagaacaggcaggataagaataatgcaacaccacagaatccagatgcaacttttccataataatgtctgatcgcatgtaagattggcattcctgtcaacatagaaatacggtaggatgtcagcatgaatgtaacacccatgatcaggatcggtataatcagccaaatcaggctgtatccataattcgcaccaatcattgcagatgttgtaatattaccaggtccgattactactccggtaaggacaattccaggacctacacgttttaaaatttcttttgcagaaagcttgttgacttttgatggatcaaatccatctatccccagatttttgttattttctgtcatagctcctccgttctaagagtgatgtctgaaacatgattttttcgtatatatttcagacaccacatctatagttatatcataattttcgtcttatttatcttcgaactgagtcatatcaacttccggaagctggcttctctcaagtccaagagctacccagtctttttcttcctgattcagcggaagaaccggttttctcataagtgctgaagagaagattcctctctgtttcagagcttctttcaatcttgcatgtgcttcacctgatggctgtccgcctccgtagattgcctgggaaatgtggtagatacgatctgaccaatcctgagcttcttttaatgtatgtttgtctgggttcgcaaatacttctcttgccgggcagatgatctccggtacgcatcctgcgaatccaatcagagctccgtccattcccgggaaccagcttacgcacagtgtctcgtcatgacatgtgataagagagatgtccgggcactcctgacgaagaagacgtacgtcatgctcgtagatagatgtaactcgtgttcccatcttgatacattttacatgatcgatctctttgcacattttgatcagtgtctctaccgggtagaaagctttgcttgttgccggatacaggtggatgatgatgtcgatgtcagctccctctgcaacatcttttacatactcgaacggtgcatccgggttcataccgaatctcagccacatatgtggtggcataagaagaattccgtcagctcctgcttccttcgcttcttttgccatctcgatagactctgctgtgttctcgcagttaacaccggagatgattgtcataacgtctccacactcttctgcacagatctctacaacacgttttctctctgctcttgtaagccctgtaatctctcctgtatgtccgttacatacaagtccgtccattccttttccgtagaatgttttgatccatcttaagtatgctctgaattctggttcgttgatagaatagtcatcgttaagcggtactgatactgcagggaaaattgtcttgaatgtttttacttttgccatttttattgtctcctttttcttccgaatttcattattatcaatttccagaactttgcgcattgttcatttttcatattacaaacgtttgttgtttgctatgtttaggttatatcacacaatgcaacacctggtcaacgaatcaggcctctcctgcaatttgttgcataaatccaattcacctgccattttcatgcaatttattgtgtatttgcacaacaaactgcataaagactgaaaaattagtttaaaaagataattttaacgaaaaggcaaaaaggaagctgccgcttcgcaattttattgttaaagcggcagcctcctctaaaaggcatattttatcttataataacatggcagaattattgcagtatgtttcttagtcttcgaactgtgtcatgtctacttccggaagctggcttctctcaaggccgagagctacccatgctttctcttcatcgttcagcggaagaactggttttctcataagtgctgacttgaagattcctctctgtttcagagcttctttcagtcttgcatgagcttcacctgatggctgtccgcctccataaattgcctgggaaatgtggtagatacgatctgaccaatcctgagcttcttttaatgtatgtttgtctgggttcgcaaatacttctcttgccgggcagatgatctccggtacgcatcctgcgaatccaatcagagctccgtccattcccgggaaccagcttacgcacagtgtctcgtcatgacatgtgataagagagatgtccgggcactcctgacgaagaagacgtacgtcatgctcgtagatagatgtaactcgtgttcccatcttgatacattttacatgatcgatctctttgcacattttgatcagtgtctctaccgggtagaaagctttgcttgttgccggatacaggtggatgatgatgtcgatgtcagctccctctgcaacatcttttacatactcgaacggtgcatccgggttcataccgaatctcagccacatatgtggtggcataagaagaattccgtcagctcctgcttctttcgcttcttttgccatctcgatagactctgctgtgttctcgcagttaacaccggagatgattgtcataacgtctccacactcttctgcacagatctctacgacacgttttctctctgctcttgtaagccctgtgatctctcctgtatgtccgttacatacaagtccgtccattccttttccgtagaatgttttgatccatcttaagtatgctctgaattctggttcgttgatagaataatcgtcattaagcggtacagatactgctgggaaaattgtcttgaatgtttttacttttgccatttttattgtctcctttttcttgtatgagataacatgatttttaatgtttcctaacaacgcgcattgttcatttctttctatgcaaacgtttgttgtttgctatgattaggttatatcacacaaaaaagagacggtcaataaaataaccgtctcctgcaatttgttgcataaatcagataaataatggcttttactgcaataagtttccaacaaaattcattttatccgtgatactctccattatactggatcaatgtaatatcttctacattcgtgatcttccggatcttctctgtgaaatcaagctcattctgccggcagaacacctcaaccgccatctccgtcttctctccacgcatcgtctttgactttatgaaatattttatttttccaaagctgcggataatttcatcacctgcctcatctccctggtaatggatcacggcgatatagattctgcctttctgctgcttatgataaaacagatagatcataaggatcataaccgctgctgcaatcaacgccaacggatacattcctgctccggtcgtgatacctgtcgtgatcgcccagaaaagatagagcagatccatcggatccttcaccgctgtacggaaacgtacgatagacaatgcaccgaccataccaagggaaatcacaatattcgtactgatcgccagagtaaccatgcaagtgagaagtgtcatgccgaccaacgtaaccgcaaagctccgagagaagatcacccctacataaaacttgctgtaaaccatatagatcactgctccgagaagcaacgccacgatcagcgaaattgccatcttcggtgcattaaagctgtcaaacacgccggattccagcaccgacttcttaatcatatcttgtacactcataatcgttttctctcctgtgtttcattccaatattcaaacccatgtaagtactgtgacttttcataacagagtatatatttcgatactgctgtgaattcctgtgcatttggcggaagcagatcacgcacgatctgtggaagcatctctgtgaatttcacttccatgaccagcttccccggttccagcacagacagtgtcggaagagacggatcaaagatatcataacttccgaccgccgcacgcacatcactgtcaaatgtaatcctgactgtcccctcgtccatgatccacggtacacggtcatagtcaacgattgtgcgcggacgcataagattgctgacgcattccacataaaattctctgcacaatggatagggactctttaataaaaattgataatccccatcaagaatcctgtagaattcttcttttgtcagcggagcgctttctttataaatataacttccgaatttcttcttccgctccagtttgattgaacggtcactacaatcataaatacggatcctatatttttttcgcatcagaacaccagattccttttccgcataagcgctgttgaaataatcttcaaaataaagactgcggatcatataaccgtttccctttgcatttggatcttttttcaacaaatgcttcatcctcagctccagcagttctttctcactggtactgatcagatatttccactcattacggaagcgttcttttgataaatcattcttcataaatatcttcctcaacattttgtccgcctgtaatgtagaagcatttcataccatagtttttcccatcatcggttacataataatcaaatgcatcctacgtctttccggattcgtttgtcgcacggacacggacgaaatactgtccgtctgacggaaccgtagtttctgcttccggaatttgaatattatcctgccgaaatacaatctcattgaactgatagtctttcgccagttcaactgtataagtaatcgtctccgcatcaaaatcataggatgcatcccagttcagcttcaaggtatttccctcgattaccggtactccaatataaaatggcattggtttttccagactctccttataaagctcataattttgttccacctcggaagggatcgccgctgcaactgtatcatattgagcttcggtcagcggtgcattcatctggtccggcatctgatacaaatacttctgcgtcactgtgcgatatttctctatcataccgctgatccgctctacgctgagataggatctcagatcctgaattgccgcatcaagttcctcacgaaactcctcggactgcagacatctctgaaaaagaacatttccccagtaattactgattccacattcccagcttccctgatcggaacgattttgaatactatattccgttctcataaatgatccatcattgtcccacgcaatcaaataccaggtatttgaattctgtggactatataaatatgtattacggttctgcgtatctacattcccggtcaggatctgatatgccatccaatacgtcagattttctctgtcaaaatattgatccaggatattagcaatcgattttgaattatcattcagatccgtaagcatatcgatcaatttcgtatggtcagaatctcccttgatctccagaagcttttcaaatgctgtctgatcataggtcggatcgtcttctttttttatcacatcttcataacggtaaaactcaaatgaattgatcttatacaactgcccatttgaatccattccatgattcttcattcccgtcttgttgagctgctccacctgcgtatacaaaccataatcctggaattctgtgctgttcccttcggtgagatctcgcacatacaaatgtacgaactgggttctgagagacatcaactgtgggattcccttcaaaagatcataagacagcttattgcggaaacgcattccctctgtctggtgtttattcaggttgatcgtacgctgtcctcgccaggttcctttattctttttcagttctatcttataatttttctgtgcattactgcttgaagtctgccctctgatctgcaccgtcgcattcggcacattttcaccgtaaccaacctctccactctgtggaccagactcatctccaacctggaggagcgccgctgtctggtaacggtctactcccattttgtcataatcataagccgaataactgttgatttccttccaggtatgattcgtaccctccgaagaattcccttgagaaaccgtaagatacattgtcacaacactcgtctcgtcatcattttcatagaggctgtccttatctcgaagatgaacgtcattgatatcctgtgtcttggccttttctattgtttcttgttgctctgtctttgtttctgaagcattccctgtttcccccgaagctgtacatcccgtcaggcaacaggacattcctaataacagggcgcatcccagtgcaattgatttataatttttcaagctcgtctcccctttctattttctcttccagaaaacatcctaaccgtgtgaaaaatcctgttttatcttccgccacgattggttgtacactcaaaatataatacggaagttttttaataaaatatccaagccgcagcgtacagatcagaaagaatactgcacttccaagtaaaaatccaaagccatagtatacttgcgggaaaaatagagatatacaggtaaatcctgtcgtacacgccgcaaacattcctgttgcatataatgctcctttataatctgtaaaatacagcaggatcagcatcattgtattagcaaccgcataaagtccataaccgacacacagtgtcctgaaatagccttccataagatcattaaatccaagcggaagataggtcaggagaagctgtcctacagaaagcgccaacgccgttgtaaggagctgcttcagtgccgtatacttcagctccatattcaaaacttctttcatctcgtttcctgcccgtaaaatatctttaatttctcctctgtcattaaacagactgtagtaattcctgtatttcggatagaaattcacttccaccgacacaacgaaattaactgtcgttataagaatcgtcagatatgcgatcattgcagggacatcgtgatacggagcaccatagaataacccctgtacatgtacatggatgggactacaccacataataaccaaatgtgcaaaaagtccgatattcgtaaacaagcctataaaagcaagcggaaggaattgatccacccagcgcagaaagaaaaatgcactgctctcactctgtggaaaataacggtatagcagtgtcacatcccacagaagcatgatcccatatccgatcgttacagcaatcatcattgcctctacatgtggaattccgagcaaaaccagtagaactccaatcaaaagcgacactgtcactgccgacacaaacgatagaagtatccctttataatcctttatcgcggtcagataactcatcgcattccatgtgacgatcagttctccgaaaaactccagacacaaaaactggtcaatcagattgattccggaaaataaaagaaagattccgtacatgatccctcctacaacaagcagaatcgttgtcgatccccagaaggaaggaagcactgtttcatgtcgttcttcatacaacatatccgcaatatatctcgtcacaaccatagaaaagaagcttgtcacagtcagcgaagcgagaagtgtataagtaatcatacagtttaaaagctcccggttatgccttgtcgcaccggtatgatcacagataaaggtaatcccaaccagcagtacaatgccgagcagcatcggacctgtacagataattccggcatatccataggctttcgcagtcgatgcaattccacttttctggaataatttctttaactcaaatccgattccggccatctgcttcttccacctcccgatacattttccgatacttttcaatcatttcttcttttcgataatacgcctttacccgtttctgtgcatttgcgcccatacgaagtcttcgcgttctggaagcacacatctgatccattgcctgcgcaagtccctcacgatacattggcggaacacaatatcctacggatccataacagtcctcctcgttcccgtccagaagttccctgcaacagcccacatccgtagtcacacaaggacgccttgcggcaaatgattccaggacagacaacggctgtccttctgatatactcgtcaaaattgtaaaatccagcttttccatataggaaataatatccacacgacctgtaaagatcacattttccaaatgtaactgatcgaccagcgcatagcattcctgcgcatattcctcatcatcaacgccacccataatatggaggcgcacatgatctcttttcgtacacaactcataaaacgcataaatcattgtcttgatatccttgatcggtgccagacgcacaactgcgccaatatcaacccatccgtcttcttctttcaacggaatagaagagagtcgttcgtaattgattccattctcaactacacgacatttttccttgtcacatcccatctgaatctgtgcaagcatagcattggtaaacaacgctgagacagaaaaggctctcgtataaataatatccgacaacatataaaagaaggcgatccactgctttttaaatgccggctgtacccattttgcacggatgatctcttcttcacgctctcttgtataaattccatgctccgtcaaaagcactttcttcttatagacatatccgccgagacacgcaagaagtcctccgtaccccgtacagatcgcgtgataaacatctgccttaggcacttcacttcccatcagataaagaaccggaagcagcatagagcgcatcgtgtgaaatgcatccgcaaacggagtatatggataatcttttatacagcactctgtcaatatattcaaaaactcttcacttttcaaaaaggacatcgggttcagtttctggtcataatagaggtgaaacaaaacctcccagtccggacgtttgcacagcatcagctcctttaagctgttcttttcttccttcgtaaaagcatgaagcattttccctgaatccttcagcctcagggcatcatccaggaaaacctcatggacctcgacgacattttcaggaagttcgtagacaaatttccctcgatccttcgcatttgctccgatcacccacagaacaaactcatgctctttcatttcattgatatactgatgcatccatgtggatacaccgccaaacacatagggataacatccctctaatataagacagattctcacaactaactccttatctgccgcattttactgcttcgtattttattctgttttctcgatggttacagtcggctcctttgccttgagcaaatagagatttccggtcaaatgcgtaagttttcctcccgaaacatctcccggtgttccttcgttgatccgcaccataaaatacacttcatcataaaaattgtcgagttccagtctgatctcctgatctgtcactgtctttgtaaatgtgaccgctccgtagcgctggatcgcgccggacagttccgaacctgtaagctgtctcaaggacggtgctgaatcatccagccagtccatataatcacttaagttccctttcaatttttcccagccaagtgccgcaccacgatcttcgtccagaagatcatccggatgtataaaatggctgttcacaaaatgcatgttcaattcagacaatgctgccatcttcatatagctatcaatgatcgcacctgaaatgatacgaggctgttccacaataccgtcctccgccacttcaaattcctgcacataagcaaactcaccggtgaaatagttactggcgatcgtcctgatctgcggaaaatcctctgcaagcattctcctaccttctgccgacaatacattggacggtggtacataaaccgacatcgatgtgcttggaaatattttatcgccaaatcgtaccagttcctttacagcctttttcattgccgactgatttttccaggtgtcatatggaagcacatcgccatagtccgtatttgggaggcttaacggctgatgattgtatccatgatatccaagctccccgccctgatggagcaacatatttccaaaatattcgaagcgtttggtatctttctgcttctcgatcgtcccgtctgtcgcatccccatagttctcaatcatcacacctgtataacggataccatgatcagaggcaagttccagcatgtccggccaccatacgttcatataaaaattgctgatgctcatctcataatcacgtttcacataagtaccgtctccatttggaaccggtgacgggaagtcatccagataaaatgctgatccattgatcaccggatagataccgacatccgtaagaagactgtaagacgctgcataaaatccacggactgccttctcatacaatccaaaattatctactacaaactttccttttccatattgattttcccagataaccggctgaccgttttcatcctctacctgcgcatgaaccttcgcctgctcactcaactgcactgaccaggcagaatcatatggatctgtgatttcataagcctgcccgccgccaagcataaaatccggttcaaaataaatactgtctacaaccgtattttcataacctgaagaaataattccaagcttctgctctattatcgacgtatatgccgttttctgaagagtcatcgcaaagagcgcatttccaccttccgaaacccagtcacacagttccaaaagtttctctttcaatggactgatatcacttaataatacaaccactgtttcatactcatcatagtcagggatcacagaatcactctgcagatcgactacatccgtcccaaccttcatatctttaaatatttgctgaaactgtgtccaggcctgttcacttgcttcatccgcactgttgcgaatgaccagacaggtcttcgtaagcgacttcacagccgtctgttcggtgactacttcttctcgatcgagatacgcaacttttctattcttttctgtatattgaataccacttcgttcagcaaaaagaacaactgccatcatcataaagacgcacaggattactaacatgcttttaaacggaaatgttttcaatgattttaatctaaccaaaaatccaatgcctccttactcttggaagacagataaatgtgttcctcctgcatctgtcttaaacacttctgcaactcggatgccattttacgttccgccagatactgtatcttcagagtccagaattcttctctgtgatgccatttctgatccataagttccagaatttctcccgcctgaacataatctccgtttttcatcagatttttaaacaggcacacacatgtatggagcgttgcttttatcttcagcttttgattcaaaagccggatataacgaacccgctgttctttctccatctgtgcttccagaatcccctgattcagatattcttccataaaattacaatactgatccagaacttcgggatcattcggagatgccgcatacagtttttccagtttctgcaaccggaagtcatactccttagagagctcaaccatagctgtgatcgcataatgaaccacctctacatcttcgttcatacgagcctgtttcagaatgtccatgtattcttccggatcgtcgtttagcacatccatgatcagctcacgtcgtacccccggcttattgatcagaagtgcttcctccagaggaacaatcttctcatccatatccgaagctgcctgaaaaatatttttataaatctcttcattcacacgaagcttttccactcccggctctattctattgtctcttttcgtcagcctctgtaaatgcaaaagcagcacacatatcgtcccccagaaaggaacaaaaactacaagtccgatcagatattttttcgctttcagaaaatgtgtctttattcccatccagaccaatacacaacaaacaatatgtaataggatcagaagtatcccaagcactgtttgaatcataatatctctcccacaaatatgccggtcacaatctgttgcgaccggcaataattcttcgcttctctttcttttctcacttaatccgcactctcgacagcatcgatttcatgacatataaatccgcccttctccagtcttgcaagaatgatcggcaatactttcctgtccgtctgcgaaagaatgagaaacagctcttctttttcagaaattccccagacatcattttcacggacagacttctgcagcactgcatccgcctctgcaagtgacatctgcggataatccagctttagaagcgtataggatgccagctgttcttctctcatagcatgaaatgaatacaatctctcttcaaaatactctggtttcaatgtacttgtacctgacacatactgcctgctcttaaccgcttcctggtattccagcgcacgcaaaagagcggtctccaccagaccactgagaacctggaacaaattcagataataaagagaaagctgctcgccctttacatcctgaataaaaatcagcatcacgagctctccgtctttttgaattcctttcatacacattggatatccttccaggaactcccggtttacccatacatttccggcttctactgcctcatttgcctccagataatccttcatacaaatagaattagcaaacacatctttcattccttgtgatgcgatcgtaagtcgtccaaactgctttttctttcccaccgaatagattgcaatcgtatgattctcaagaacagattccatcacatgaagcgtttcgataaaaagatcctgcggaagaaagacatcaagttttttcgtaatgtcaaaaatcttaccaaaactgtctcgacttcccagaatctgcttcttgtattgacgcttatcccgaagcgtctcctgatacatttcccgcgcaaataaaaatttatccaaaataagcttattttccgctttcataaaccgaacattctcagtattcttcaatcgtacatatccacagattgcgctgacagcgaaataaaagataaatggaatccagttcgacggttcgtaaaaaagtgttgtccatccgattccagtctttgcatatgccaccaacaacgaaagggattccagtcctgctgatgcaagtccataattaataccgtataaactgctgaacagcacgatatataccagccgcagatcgatcatctcaaactgcacctgattccctgccactcggttcagtacctcgaacacaaaaaatgtgagcaacagctcgatgattcttacaactgtcgcatgactgttgagaaagctcttcaaagcatctatctttcggatcttataatttgtcttctgacaatactgtgcatatatttccgagagatcttccaaaaaagaaatcttcggaaaccagccatattcattcctcaatatcttgtcagtgactattctctcctgaatcatcgcatctgcaagatatgtaatgtgtgcgaatggaaatatctgcttaagcttttctccgagctgttcaaaggtaaaatgaaacacttgcggaatctgaagataagtactctcctcattccagttatcaaaaatcttatataacaggtccgcaagatcactcagagcaagaaaatacatttcctgagatggtgcttcttcaaagagaatcgacttttgattgagtgctttagaaaataattgaaagaaataatcctcctcgtaagtgccggaataaaggtacggcgcacgcagaatcttaacagaaatctgatgcagttcgcaatactgcctgcagaactcctctacggtacgaaccattaatgtctttccggtcgtttcttcatacaaaccctccggaccggtaatatacagcaatcgtgaattcgtatttcctttataataatgtaatactttacgtaaagtctcaagctcaccgtctttcttcccatgaaaggtgagataattagaaaaataaatcacaccctcaaattcataagtcttaaagatatcttcaaattccttctctgcgtgtggcattggatgtaccgatatccccttgcgacgatctgactttaatgcagtctctccaagcaggagaatctgacactccgggaaggcctccttaataaattcagttgtgatatatccgatgtttccagttactaataatttcataagatgatagcctcatattactcatttcctttagtataacatttttcctttcagattagaatagactaatcttatacaaattatagctgattaagcgccattctataacaaaattcactatggtaaaacattgaagtcacaccgcaccgtcaccctgttctttccatccagcgtacaggtgaacaaactcaacgcccactctccgcttgtcatatcttccacgctttgtggagtcagtgcctctaccgccgtcactttgtattcgaaccggttcccggccgcatctgtaaagatcacctcgtcaccggtctcaagttctttcaacttcccgaaatgtgttctgtaattatgtgccgcgatcacaaggttatccagataagcacttcccgaataacggcaaggtgctttcttcagaagcgggtagctccattcgctcaataccggaagcttcaagtcgattgccggtatctcaagcactccgatgcacgctgcgccatccagctcttccaacatgacctccggcatctccatctccgggttcagctgataatccggtatctgtccgtcagattcttctgcctgctctccctcatcagaaatattctggtttttgtctctatattcttccaacagcttctctttgctttgctctgcccgataatcatcccagagattgtatacagaaagagcaagggctgccgcgaaaagcagcaaccctgtgattgtaaatatctttcctatccaattctttttcttcttgctcatcgattcttctcttcttttctatcccgtaaaactcttcccaccagcagacagatcgcacctgcaaataaaagcacaagtaccggccaccagagctgtcctgtctgtgggagcttgtctgatgtcttgtctgttattttatttgttgtcttatccgtcggcttcttcgatggtggattcacttctccatccgactttcccggtttcttcgctgtatttgtcaaaacaactgtatttccttcacgcgtaacagcaacggtatacccattcggcacatctgcctcagacacgctccagcgcatcagcgtggaaagattcttccatgtataggaccactggttttctttcgtaagtgtctggcggtcagcgactgttgtattcccttccacatctgtctgcagcagctccaccacgatagaatccggacgttctttctcctgatcctgcttccacactttcaatacatgaatcttcgtctcttcttcctcttctggttcttccggctttcccggtttgtcgttcttctcgaacttcagaaccgctgtcacctgatacggatccattccctcggaagttccctgtgaatcctccggcaatgcgatcaatgctgtctgaggctcatagatctgtgtcttgccatcttcctgctgctctgttgtctgtcccagcacaagataaagaccccggttaagatctgtaaaacatactttcctgtccgaacctgatgccagcactgcatctgctgtgattccgtcacgtctgatatagtccgccagtgcatccactgtcccctgccagccctcctggttcttctgctccagtgagaccggatacttccggaatcgttccgtcaatgtaaaactgcccgactcctcatactctgccacacggtacagagacaattccatcccctcaaccgggcagacaatcgagatgcttcccttctgtgtactctcttcttccgctgccagaaccggactgccctttgagattccgagtatcccggtcagcgcaatgagaaatgtcaacacatatatcatataattcctgtctctgtggcggattcttttctttggacttcgcatgttctccctcccactgatcaatttatctgttactgttcacacgatgtgcgaccagcaacgcatctcgccattttaaatctcctttggcgatggggcgagatgcattcaagtcaaaacacgcatcctccgtgtcaatcagcggagtgattgacacgggagtgaacagtaactatttatcttcctctattttttctgcttctttcttgaacgccggattgatagatccactacaagaaaactaatgattaaaagcggaatcgcaacacataccgcaactgtcaaactgcttacctcagccgcatccgatgtcactctggagtcatctcccgaacgattttcaatccgatgtccacgcaccagcagtctctgcgtattgattccatatggtgtacatgtaagaagtgtacacagatcttttccatcttcaatctcaagcaggccataatcttccggctcgacaatactgatctggtcaatctcatacgtcaataccttatcataaatgtgcagaagaaagatatctcccttttccaatttatcaaggtctgtgaacagcttcgcactcggcagtcctctgtgtccggataacacacagtgtgtgccctttcctccaaccggaagagacgaaccttcaatatgtccgataccaacctgcagaacagaatcctctacaccgtgatagattggaagcttgcagcgaatttccggaatcgtgatatatcccatcattccggttccatttgcatccagaagactatcatataaagtatcttcctcttctgatggtgtaaagcgtcctccattcgtaatcaacgtctggttgtactcctctgccgccgccagcgcctgctccttctcctgatcatccatcttctctatctgcttcgaataatccgcaaccgcctgcgtctgatgcttcgaattccagaaattactaattgtcggatacagcagtaaggacaagcctgtaagaaagatgattcccgcaattattgttgaaatatgctttctcatgttacaatcctctccttgctgctgtatggggaatgataaaacacattccccgtacagcaaaattacttcattcttatctcacttacatacctataatcgagcaacaattatttcattctcttctttgtaatcagtacaactcctgatccaattacaaggattgcaccgaaaatgtagaacaatgttgttcccattccacctgtggatgggaggatagagccggatttgttgaggactttaacttcggttacttcgtcttctttatctgtaacaactttaataactcctgcctcatcaatcttaatctttatcgggtctttcagcttattgtatccagctggctgttgtgtctcagtgaggtagtatgtacctgcgtcaagaccctggattgtgaatttaccggtatctcccgttgttatttttgtcactgttcctgatgaattgaccaaatactcctccgttgttgtacccttcttcttttcaagcttaattatatcatttcctttttcatccgtactcaatttaaatattgctcctggaagtggagtatctgtacctgtatatttgaacactgggatttcaaaagttcttgtagttgttgtagctgtctctgttttattattatctccatatgttaattttgtttcattcttatttcccgtatctccaatctcagctttctcatttaatgttgcagaatatgtaacgataagctgatcatcgttttctaatgtatcgcagagcgctttttcgaatttcacttcaaatgtacattgtggcccttctatctctgttcctggtgtaactaactcgtactgagtatcactcactattgtctccgatccaccattatttttctttaatgtaacatctaccttattatcaaatgtcaacccggcactcattgtatcatgcaatacataattttcagcacctttttgggctgtaattgttgttttgaattctactttatcatctatacttgctgtatttttgtcttcataagtagaaccactttttacctttttctccactgaaggtacaccgttcttttcttgaatttccacctctttagctgtggtattaagagagcaaagagctccaacactagaatcaacaagataatatccaagtgaaaggttatcaaatgttaacgttgaagtagtctttccatcttcagcttttggggcactcttagattcttctgcttttattgaagtttttgcataatccaatgcctcttttgcgaacgctgcaggatctgctttttccacccatgtaacatatccgctaccatcagttttcaaatacttctttcctgtatctgacttaacaaaactctcccacttgcttgttgctttataagcatagtttcctgaatttggttctgttgctgttttatcactaaaactctccagttccaaaatctgataaattgtatacgtctgttctggtacagcattcctaatcgttatctttccatcgttcgttgctgacgtcccactcgttgtagtcccctcagctcctaccacactacacattcccaataccatcataaccgagagcattatggcggcaatcttcttgattattttcattttcttcctccttgtttttgttactgccccccggaattttccggggtacagcacaccctcttttgttagtttcttgtttttgtttctttatatttcatcagcataagcactactgcgaagagtattaatatcgctcctgccaatctgtaaataagaaccccacaactgcctgtggaaggcagtttattcacacggctttgatttgtaacggttaccgtgtcaccgttggttgcactgttcgactctgttgcgccattctttgttgtcgtatatgacgtaaagtattccattccgttcacaatagcaactctagacgaatctttgattggctgattcttatcatcaagttcaaagacataataggttgtatttagatctagattcttgaatttcgctgtttttgcctcagtgtcacccggactataagtaatagaaactgtatccagcggtgaaccgcttcctcccgcattgttataaagaccaaacttataggttccacttactggcttgcgagaatttccagctgcatcattaataaaagctttttctacaacaatacctttttgttcattataaatttctaaaaagaaattcttggtatcgtatgcaactttatatttcgtatcatctttctttttttcacaatacgcaatatatgcatttgcctcatctggatatcttccttcttcttgcttaacgcacataatataatgtggcgtctcatccaatttatatccatctgctgcctttgtttctttcacctcgtagattgtattaaactccattgtgaattgttttgtagtaatttcacaagtaccgtctgttattgtagccttcaccttttgggtttcgcttttaagttgaatctgattatcttttaattcacattcagaaacttcaaattcaactccattcaatttattgcttgtattatcttgatcaatctttttaattgtcaagttcggatgtaatgtagttccgctgcttccacccgcacttaactgataggaaaattgttcgattttattagttgttccgccttttgcactataagacttccaataaacagaattctgtagtggtactgttttattcggagcaatattcacggttacggaatacgtaatctcaacaggtgtttcatccggaatcacaatttcaattgtcttatcttttgggttatacgacgattggatttcaacttgctttccgttttttatattttttgctttcaaagattcactgtcgaaacttaaatattcacccaacgcatcaactaatgttagtttctctccttctgcagttaatagcttttgacctcgtgagttcgcaacaattgtataagttactttttgactttcgtttgatgatgtagttgaataaccattttctttcgtcagattcgtatcttttatctttgcatctgccgtagctgtcgccaaatcttctccatttgcactttgaagaacaaccttatttgtaaatatcttttcttcaccaccaagtaaaaccttcggatccgtcactctacagacaacctgaacatcaacagaccctttgtcttctatatgatctgctcgaaatgttcccaattgaatcattgcctgcttcttatcattacttacataatagattgtatgttgtgattgctgattatcattcgtcgtgtcattctctacttctgtccactcacttccaagatttgcaatcgctgatgattcaacactggtagcatttgcacctttccattttatgcggatgtatgcaagttccatcccctccggaatttcttccaaaacgcgataattactattcagttcaccgccatgattcactttaaacgcccatgctgcatatatgccactgccggtatccttcaataaatcactacaaattttaccagaatcccctttatctgccccatctattgatgaatccgtcgtcacttttgctccatcataagtgaatacctgtcctaactcttttaaaatctctccaccatgatacagcttctgatcagcagaacctatttttgtttgagtttctcccggctctgttttatatatctcatttctataagtgtacggtttacgatattggtccggtagactctgcggctctgttctgacaatgatataaagtgtttgatcctctccaagtgtaatatcttcttttgccttgaaaatcaaattattataattatcattattgaaaccatctttatcttgttcatagcttagttcaaataaagaatctatgtcctgcttatcagaacctctattctgagtttcaaattcttcaaagctgctatatccttttatctcacctaaatttcctttgtaaataccagcaattgatgcttcattcttatgtataaaagaatctgtcaatccattatcccatgagattgcatcttttatttcagtatctttttttattgcagaaccatttacttcaataatccaataaagcttaccattctgccacgttgttgcattttcttctggttcttcataataccaggctttttttgcaacattcaaatgataatccccttgcaatgtaacttttacagaagaattcacattgtcgaatttaaatgtcttatctgatccatattttttaacttcatccgttaatttgaatgtattagtaacctttgtttcaccaattgtgcttaaatctacaggctttgcataatattcaaattgatacgaatggttgttatctttccatcctaattgagacagttttaagctgaatgatgtttggttatcaattttaacccacttcgtttcaactgcattatttgaactatcatatgctgttatcttcacatatccaacatatttcataacatctttatctaaactatcagttaaagtagctccggttacattaaactgcccctgggtctgattaactttaactatatactgataacttcctttcggaactgtaaattcagttgctatggaatcttttttttttgttcctgaagaatcatagcagtatatgtccgaagtaccattttgatccttcattgaaatcttttcggattgatccgtaactttaggctgtgtcttctgaacccatgaatattcatttagatcaagtggctgccaaacttggtttatctttttcccaccttgttcattatcaacatatgctaaataacgattcttaatagtcaccttatccgactgcattgctgcatacacttccggtttaactgttatcttgtatgttacgtaataagaatctcccggatagattgtgataggactatcatccagtttgcttactttgaatcgtgtaggttttctatttgtatcagtccaatcctcttggtaactatcattaccatttgcccatgatattgttagtctgtcgtggaaataaacttcctctgctacacccgctttttctacatggagttctacagaatcaggatcataagaaatatacgggagcatcttcggatctgtataaatatctgaataatctaaataatccctaaattcaaatttttgtataggataattactatccgaattcacaccaaactttatttcatattttatctcataatttccatcagcatttttcgtttgatcgcttattgctttcgtcatgttataaccaatacgcacgttagatgtaacctctttttcaccttttaaatgcgtttctaattctttatcttttcttgtatatgctttcgctttatttataagattttcactgatgaatgtagaattcatatttttgctaaatatagcattctcttttaactttacataataagttaatgtacgactctctcctgcttccattttagcaatattccagacaaaactacctggttcactaatagcagtagaatctgtaattggatccggaatcgcttgctctgtcaatgcattcgtcaaataaatctttccggctaccggactggaattaccagtaattgtttcatatgggttttgagcattctcagtagtggtaagtggtgtttcatttttatcaataccaacataatttaccagatttttattctgtgtaaattgatccactacatagacgttcttacatccatcatcacctgctgtaactgtgattgtatatttaatgtattcactattcttatctttttcactgaactgcttgtctactgtaacatttccgtaacgttcataataatcaggatctaattttactgtaatgtcactttttagtgtatgaactgttgtttgattagtttctggatttactgaacttaatttaagttgagcagacacaaaaaattctccatcaatcgtttgattttcacccagagattctaaatcttctgcgttatatttaacgactacttttccatctgtagaaacagtaatagttccaatcactttatccgaattatttttcatatcacttgtagttgttttcttaatacggaaaacatccggaagctgataagtaaaggatccatcggacttcttcaaatctgttaccggaattccttggaaaccaactttgatcatcatgctcgaatcgtctggtagaataacagttcctccaattggaacttctttttcaacaccattctctctgtatgtcaatttaacatacgtaatattcgtcgtatgctcattcagcacatactcacctgtcaccccagctgtctcatccgctgtggttcctgctgtatctccattttctccgttctgagctacattcccatcatccgatgtctgaacctgatcctggctctggtcttgattctgttcctgactttgtccctgattctgctcctgtccttctgtctggttctgctccggtgtctgctgtgagtcttcccctgattgatcttccgatgtcttatcatctgcataacacgattcggtatgcgtatgttctgtttttccgcaagtcagctgtccgtcactcgaatagcattcttctgtatggctatgctcttcctgaccacagactgtctttctctccagcgtgatcgccgggagaatcagcgcatagaccgtacagaaaacaactacacaggacagacacaaaatcatctttctccaccgttttaaccgggttttgtcttttaataatcttctgatataatccgttcctttattctgcacaaatccaccttcttttttctggtgtgtatctactgccttcctttgtcagtcttcccttcgataccttataaactaaactaattatttactatttcactgtatgcttcctgttttattcaatggccagattcgaaatacaatctttccttcaatctgatcttttgaaacatcaccaatcgcagcacttcttgaatctacggatacgtctcggttatctcccataagaaaccaacttgattcctctacctgatgtggaagatctatatcacaatttcccagtgctttcacatctaaatagtcttctgtcagttcttttccgtcaaccgtcacatttccgtccatatcaatatcaacccactgtcccggacctgcgatcacacgcttcacaagaagtttatttccttgccagaatgcaaccacctctccggtttttaattgattggtcttcactgatactacgatttgcccggcttccaatgtcggtgacatggaagaaccgtaaatctgcagaaccggcatccacagagttgccaccaaaacagaaattgccgcaactacaagcagcacggcgatcgtaccgcggagtgttctttgatataccgcccggtgtctcagcctcttctgttcattctcaacttcttctattgtagggatattaactgaacgttcttttttcttcacaattctaatctcgcctattctttttggcttgctttgtcagtttcgccaattctttttcctttgcttttatcgatttaagataggtgtcagcagcttcctgtgctgcctgaaacacgccacttagctccactgccgcatcagcgatcgatcctgctttctccatcgtgatctctctggcctgaagctttgcctctgcctcatccagcctggtctgaagctctatctcccgcttcttcatctcatagatcagatcgatcaattcgcttcttcttagatgcttcaaatcgttcttcatacatcatcgactcctttgtcctgatttatgattcttatagtaaaacggttcgttcaaaaccaagacatatgtcattttatactaaacaaattatagtatcacacctgatcttgtcaattaattttgttcattttttatacattcttttttcataatttgttctttttttcacaaaatatatcttttctttttctatttcaaaagcagcttatatcctttgtgttatttcacttttttctcttctttattttctatttttttgtcatttttcaacaatatgccgaacagctctgtttgcttgcactttttgtcacttgattagtgcgaaacgtttcgctttcaagccaagaaaaagccgccggagacagtttttaagatttctctcaaagttctgtctccggcggcttatcatcaaccgtaattaatcattaaaattcagcgatcactgtctcgccctgtactgcgtccatacctgtgtgcagcttcatatccggataatcgtctccgtttgtaactacgagaatacatgttttctcatatccgtgttctttgatcttctccggatcaaatgaaagcaacttgtctcctgcgtttaccttatctccttcttttacgaagtactcgaatccgtcaccttccatgttcacagtgtcgattccttcatggatcaaaatctctactccgttcgcaagtgtaagtccaactgcatgtctggaaccttccatcagcacagatactgttgcgtcacatggtgccacgatcacattctcttccggctcgattgcaagtccgtcacctaatgctttagatgagaacacctcgtcttttacttcctcgattggtactacttttcctgacagataagcctttacaacgaatggcttactctcttctgcaggagcctgttttttcttgaaaaatgaaaacatacctacttctcgcctctttcttttaaacattgtccattggtttcaattacggtcttataccagtcaaatgatttcttctttgtacgtctcagcgtgccttttccattatcatctttgtcaacatagataaagccataacgctttttcatttcaccggttgaagcactaactaaatcaatgcatccccatgaagtataacccataatttccacaccgtcaatctctacggcatccatcatagccaaaatgtgtgctttcaaatattctatacgataatcatcttctacatagccgttctcatccggctggtctaccgctccgagtccattttctacgatgaagagcggcttctgatatctgtcatacagtgcattcattgtaatacgaagtcccaacggatcaatctgccatccccactcgcttgctttcaggtatggatttttgactgttgcgaatacatttccatctgttgtatcaacgctcgcatccgcacttgcgcatctggaagagtagtaagaaaatgaaacaaaatcaactgtattttctttcaggagcttttcatcttcttctgtgatatcgagctggattccttctctttcgaaaaatttctttgcataagccggatactcacctcttgcctgtacatcgatgaagaagtagttttcgcgatcttttcccatcgctttccatacatcttccggcgcacaggagtatggatacgtctgaccagctgccagcatacatccgaccttattctccggatcgatctcatgagcgattcttgttgcttctgcagacgctaccagctcatgatgtgccgcaagatatttcgcctgtgtctcattttctccttctttgaagacaagtcctgcccccataaatgggatgtgaaggatcatgttgatctcattaaatgtcagccagtattttacaagacctttatagcgtgtaaaaagtacggttacgagtttcttatagaactcgatcagttttcggttcttccagcctccgtactctttcgttagatgaatcgggcaatcaaagtgtgtgatcgtaacaagcggctcaattccgtatttgtggcattctttaaatacattttcatagaattgaagtcctgcttcgtttggttctgcgtcatcaccgtttggaaagattcttgaccaggcaatcgacagacggaaggtcttgaatcccatttcaccaagaagtgcgatatcttctttgtaatgatgatagaagtcgattccttccattgccggatacatatgttctgtatccggctctagtgtctctccatgtccaagcaataccttgaatcggtcttttcctgccggacatatatcgacatttgccagtcctcttccatccacattatatgcaccctcgcactgatttgctgctgttgcgccgccccacaaaaaattttccggtaaactcatcttactgcctcctgctgaatttttctgattttcaaatttattttcccatgtaaagatgcaccattccttcaacaccaaacggttcaattggaagataatggctaattgcatctctcatctgtgtaccaagtgtattcgtcacttcgactgccagctgattctctccttctctgagaagtcctgtcagatggaatcgatatggcttgcagatacgaactccttcggaatgtccatttacaaacacttctgctgtctcataagtatttccaagctcaagctgaatacttctttctgtatctatcttttccagctgcattgttccttcataacgcacagttccggatttattttcaaatcctgtaatgctgctgatcagatccagcttttctgtcggaactgtttctatgaattctggataggagcaactgtctgcaaatgttactttccattttttcggaagcagatctgttctgtcttccattctatcatctgtaccaaatgatttcttgccacttcctctatcaaatccttcagtgaaagtggcctccaactcttccgcgatcaccttcacttgattttcttctccctgaagaaataccactgattcatatggctgcagaatgagctgtgatttctgtgatacttctgtcaaagtattggcaaatgcatcgtaacggtagactgcatttccgtctgaaattgtcatttctgtgtcgattgtatttccaatattttcattaaataacataagacaatacacattatttttcatatattctccgactacaagctccggatacgcattagtaaattttactgcctgatattgtcccaattctttctgcatatcaaagttataaatctctttttcaagatagatcacacgaactcccgactgctctaatcttccaagaagttctttgccctgctgtggcaggaaggtgctgtaaggaacaagcattacctcgaagttctgtccattgatgacatattgttgttcttttacctctgctcctgcaagataatccagcgaaatgatatcaaagctgatctgatgttccgtcagtgctcttgccggtttttcaattggcatatactctccgccccattcctgctcagccggatagagtactccgaccttcgccgggtgtgttccgtctctgaacaattccatcagacgattcacataattactgaatgttgaaaaataccgaaactgcggattcattccatgcgcatagaaatgcggcggacagtcgaaatccgggaatttcttcgggtcaaacgcatgtggaacgatatgattgattccacggacgatcagatgatctgcaatccacttcatcatcttcagtccttcgttccatccgtaagctccgaaggcttcacacatggaattaccgttcttgagcgggtctaaatgtgctgcggatgaagccagttttgcgagtgcatagtgataaaattctccattacttccacctgtattgaatgcgtcatgatgataattcatccctggaacaatctgacctccgatcacatcgatccctgcgtagtccatcgtctcctggccgcggaaataatgtcccgttccgtaaccgagtcttgcatgtgcaccgttgtcttcaattgtatgtccaagatacatcacaccatgtgcatgacaccagtctgaaagaacacttgtaaaattatcacgatacagctttgtgatcaagtccatgtactggtaacggatttctgcttcggctccatttgcatttacccataagagcggcagatattttgcatcaaatcccagttctttttcaagtccttctctccatggaagaaccatgtcagatccaattcgtgcttccgttcctttttcatttccaaatctcggttcgtctgagaagaaaccttcgatcaacgttccgaaatcatttttataatgtgcatagtgcggttcataaacctcgtcaatgagaacttgtgttgcttcttttatgagcgggttgaggtaatcttttgtcgcctcttcaccaccttttctagtcagatacagaataaaaatactccacgcaccatctttaacatccagtgtcagaaggcgtttttccatatccatacattctgtgatatctgtcaaagtctctgcattgatcggatctcccggctcagtatagcggctgattcgttttgccatgtagactttcaggatctcctgttccggatccggtttgtcccacggtcttcctttcaaaagtttcagatcgatacgcatccgacgcatcggtccctgcacatcataacggcgcatagcaagatattttttcaaatactgtggatagcattctttcactttaccattcgcatatcctgttgggaaatgggagtcgtcgaggatccagactttcatctcgttttcttttgctttcgcaagaattagatccagatcgctccaccactgatctccaacgaagtccggatgcgggcgtgcctctatgcacacccctttcatcccactctctgctatcttgtccatatattcactcaatatcgcatgttcttctccatgctgccaaaaaaatggatataatccgttcttcattttctgtctcccttgtatcattactagcttttagtttttcttctcttcttttccctgtacaatgtatgccagtaccgctgacactataaatgcgagtgctgcacacgcgataaatccatagaaactgatgtccagtcctgccggattgatcattccaggaatacggaagagtccgtctcctgcaagtgcatataatttagctccgagccctccgagaattgcaccggagattcctccacctacccatgcgcaggcaaataatttcatattcggaacagcaatggaatagatggccggctctgtaactccgcaaagcgcagatgcaaaactacctaatcccgcactacgtttatctggatcttttgttctaagtgaatatccgagtgctactccggcaagtgcccatactgtcaatccgagaattgcgttgatcggatcgcttccaagtgtaaacaggttgttcatcagtactggaataaatgctgcgtgcaaaccaaggagaacaaccaactgccagaatgctccaaagagcagacctccaaggattgggctaaagttaaagatgccacaaactattgtagaaagtccattagaaacatactgcataaccggtccgatcaccagataggaaagcggtactgttattgcaagtacaatcgtaggaacaatcattaactgaatcatctgcggaatcactttttttgccagcttttctaccttgcttgcaaagaaagatgccagaatgatcgggaataatgtgttcgcataagttgttgtagataccggaatgtgaaggaatgtaattccaccttccgctgcaatagccgctaccagatccggatatacgagtgctgcaccgattgcagctgtcgtatatggattacagtcgaatatctttccgcatgaaaatcctacgatgatcggcataaagtacataatcgcatctgacgctgcataaagtacaaggtatgttccgtctgtctttgcaagtacacctgctgttgtaagaatcacaaggattcctttcaagattcctcctgcgatcattggcccgatcattggcatgatacatcctgagatcaccttaaaaaaacgattccaaagactgtcttttttcatcacctggtaatcttctttatttaccgccttactgttctctgtgattccagcttctgtctttacaaacttaactacttcacttacatgagtgccaatgatcacctgatactggccaccctgattcataacgcctttaacacccttaatcttgctgacctcatccttatttggaattgtatcatccttcaaaacaaaacgtaaacgtgtcatacaattcgtaacattaacaatattttctttacctccaacagcagctactacttcctttgccagctgtccataatcttcttttgccatgatgtacgttcctcccattcatcactcacatttaatctaatagtttcccgaaatgcatttctctatgctctctattatatctatctgtgtagcagaaaaaaatatcagtttcctcactttttattgaccatttccacacagtctgatacacttcatgcaaaggaggtgtccatcttatgaatctgaaagcgttacatcattatcttaccacgttatcccctagtgaggaaaaatatcgcaatggatatatttacgacggctggaaagatatgccgaagaaacaacataatggagtggaatattctgtattggacttggatgttgcatatttctcccttgataacaaaccaccctctcacgctcccgggcttaatgcagaactctctgagatatcaattaagagaaactcccgtttcagcgcagttccggagcatatccatactcacattgaaatcaactatgtctattccggtagctgtcctcaggtcattgacggacatccgattactctgcaaaagaaccaggttctcctgattgacacaaactgcccacactcaattgctccgcttggagagaatgatatcatgatcagtattatccccaagacagacttcctgcgtgagcatatgtttaatcagttttctaatgatagtatactctcccgattttttatcaatgcgatcaacgaaaagactgaccatgaccactacctgcttttccactcagaaaatgaccgtagaattccaatgttctttaatgaactgttctgtgagtgctttgatccatccattaattctacggatatcatcatgcatcttttctacacgatcatggcggaattgatcaatgtctacgaagacgatttgacaaaggaagattcctactcacacaacagtgttgtgattcctatgctgcgttatattgaacggaatttcagaacatgtacgcaggaatccgtcgctgactttttccatatcagtccaaactatgtcacgcgtcttctcaagaaatatactggtatgacttatattcagttgatccaggcgcagaaactacagaccgctgccaacctgctgaagcagacaaatcttccgataactgaaattgcccagcgagccggatatgaaaatgtcaccttcttctataagaagttccaggagaagtatcactgccagccgggggaatataggggataggtgaaaaacttacccccctttacttcataagcaaaaaggaaagagtcaatattcctgggggacctgacaaactcaacgcgaatattggctcttctttgttattatttatttgatttttgtaactccgctaattgctttcgcagatactcaacctctgcttctgctgtctctgcgcgctctttctgtatagctacatctgtttctaacttctctttccttgcttttagtttctctttatctgctttcagtttctctccgtctgctttcagtttctctttccttactttcagcttctcttcatccgctttcagcttttctccgtctgcttttagcttttcttcgtcagctttgagcttctcctgtttagcttccatctgtctgcctacttcatctaacgcttccatcttttttgcatgttcttccgtcattttagtatattcttctatcatctcatcaaccatcaattttactgtgtttcgatctaaaatctcaagttcttttgaaaacatactcatcatcctctccatattcaggcagatggtatagacttcctcgtatatctttttaaattccggattgcaatttaacagattaataatcatgtctggatcgtcctgacttaaaaatacgagccactcttccagtctgctctctatctttctgccttcattatgaatggtgttattaaaaatgtcaaggcaaatgaaagtatattcctgtaacaaatccatctccacaccggtatcgcttttttgttcaaagcgatggatgtattgttcttttgaaaacttagtaaaagctgcattacttttctcaaatagaactattgtatatacttttttaatttctttataagtaaatgattttcctaattctaatcggactcttttatactgcctgagcaacagatccgaagagtagcaggcacttctctgtcctgaaaataagtatcctaccttctgaacttctacatttgcaatactgccatcctcaaactgaacaacaatatccataataagaagtgaactttccgctgctattttagctgattcatttggcagaacttttaaaatcttaattttctttccaagtatttccgacaggaaatcatttaaccgttctggtcttgtatcaggattcataattgccttaaagtaagtatcatacagtaatttcactcctttgacacctgtacagatgtcaaggtattctttctgatatttttcttcccatccgcaaaatgtttcccatagccgcttattttcccgaagttctttcagcacctcaccttccgtgcgaatcatcgggaaatattgttgtaatttgtttttcatcttcacatcatctctctttcgtattcttctaacgatccactatccttacagacttccccataagtctgaaaaacagcttctgttatccctgttactactaaagcgatgtcataaacaaagtaaaatctgctccaacttgttgccatctaaattcatattccattggcaacaatatctctcgtcccttaataggagtagttctagaatacgtgatgtgatatcaaattgcaatgtgtttattgttcataactcgatttttttgtttataaaatgtggataacttcttacaatcccgtcagattcacctcatagatacatttttccgcgtttttcatcggttcctgtaacatttttccgcactttttcgccatgttttgtaacattattctcgcgtccctatcagaatcttctttccttcaaatgcaaatccgtaatgtcgaatctcttcttttttgaatccacgtgcaaaaagtgtctatatcagaaccttttatcgtttcttgatatagacactttttttaacagtcattctattaactaattgatattttcgccgtttgttgaaataacttctttataccactcgaaagaatctttctttcttctggacaagtctcctgttccatcgttatgtttatccacatagatgaatccatatctcttatccatctcaccgcttcctgcactgacaaggtcgatgcatccccatggtgtataacccatcagatctacaccatcttcctctaccgcctttttcatttctgaaatgtggtgttgcagatattctacacggtatggatcgtggatgcttccatcctcttctaaagtatcatatgctccaaatccattttctacaataaacagtggtactttgtagcgatctgtaaaccagttcaatgaatagcgcagtccaatcggatcaatctgccatccccattcacttgcctttacgtactgattctttatgcgatccttttctccgcggtagtcatattccggattgtctggttttgcttttgtacagaaagacatataataactgaaaccgatataatcgacacagccctgttttaacactgcaagatcttcttctgttacgtcaatcttaaggtcttttctttcccagtatttcaaaatatttacagggtattctccttttacatgcacatctgtataataatatcttttctgcatggctttttcagcctgcagtatatcttccggacggcaggtagccggatagatcgggcacattgcgatcatgcagccaatctgaaattccggattgatcttatgtcctgcttttatcgcttcggcactggcaaccagttcgtagtgagatgcctgatacatcaattcttctacattttcttctggtttaactacaatcccggaattagcgtaaagcatgaatccgtcaccgatatctgcctgattattaatctcattaaatgtcatccagtattttactttgtctttgtatcgctcaaagcatgttactgcaaatttcacgaagaaatcaatcagttttctgcttctccatccaccgtactcttgtacaagatgcagaggcatctcaaaatgactcagtgtgatcactggttcgatcccatatttcagacactcatcaaacatgtcatcatagaactttaatccggcttcattcggctgttcttcatcgccatttgggaagatacgtgtccatgcaatacttgtacggaaacacttgaatcccatttccgcaaataagtggatatcttctttatagtaatcataaaaatcgattgcttcatgattcggataattctcgccttttagtatttcacctgttcttcttcttcttctatttacatctccgctggttacaacgtccataatgctcaagccttttccatctcgatcataggcaccctccagctgatgagcagaaactgcgccaccccagagaaaatcttttcgaaatcccattgttatttccttcctgttgtcttaattgctttgtataatagtgttgggggcttttgcccccaacttttctgtttctatattcaattacatcttgatgattatttctcatcaattctcttatacagtgcaatgaattcatctgcgagaatacggaaactctctgcactcataagctgatcttctgcatgcatcagaagcatgtatccattagaaatctctccatttgcatccattgtcagaaggtctgcatgagcgttatgcccaagtgaaaaggcttcatctccttgtttgatcagctctgctgcctcatcgtattttccctctttcgcacaatggattgcattgataaaatgtgttcttgctgtacctacatatgtaataatctgaaaacatgccaattcaaatttttcgtccatttttgtctcctgtcctgcttttattatttttaaattctgattttaccagtcttcatcctcatcttctactggctgattcttctcctgaaccagattcatcttgtcaaccttcttaatgaatggcagataaacaaagaatgaaacacaaaggattactaactgaagcaaagcacttttccatcctgctaaaaggaatcctgagataatcggtggacaagtccatggaatctgtgttgctccatataatgggcagattcctgtatacagtgcaaaatactggattaaacatgcaatcacaggcattccaataaacggaattgcaagcattgggttcataacgatcggagtaccaaacagaactggctcattgattccaaatattgccggaataattcccactttaccaagtgctttcaactgttttgattttgcaaagaagaacatatacattacaagtccgattgtgatacctgcacctgttatattgataaactgatcataaaactgctgtgttacaatatggcctccgtttgctattgtaagttctacaccactgtcaataatagcctggtttgcaaggctgtttgcctgtaaaagtcctgtcatgattccaccaactactgttgaaccatgaactccgaagaaccacaggaatggtcctgtaaagcacatcagaactgctccaccaagggagtctgtcattttctgaagtggtgtctgaacaactttgtaaataatttccatacctgttgtgttgaatccaatagaacagataccgtgaattactgcagtccctgtcaggattacgaatgccgggattaatgctgagaatgcatttgttacaccttccggaactccggccggcattttaatacgtatatttttcttcaagaaccaacagtaaacaagcggtacgatcaatccgacaatgattgctccaatcattccctgtcctgctgtccatgtcttatcaatgattccaccaacaacttctccactttctgttgttttggacgaaggcatcagaatcaagaatgatgccaatgaaataattgcacagttgagtggttcctgattttccagtttcgcatagctatagctgataccgataactgcgatcatcgcactgatggagaatgttgcgccacatgcctgatctaatactgctttgattcctgtagactctaatacatcgacaactgcctttaccggaaagtttgacaggatcaggaagattgatccgatgatcagaggagacatggaagtcaccataccattttttattgactgtattccctttgtattaataaacttaaggatcacagggattactttttcgttaaatttctctttcatttgctactaccctttactttaaattgtgtatctttgttttctcttatttatttttcgcaagcttatatgcaaatttcaaaacattcattccattgcacattccataatcctgcattgggatcacatctaccggaaccccttttggatcacagatctcttttgctctggcaagctgatatcctacctgtggtccgagcagtgctacatccgcgccttcaatcatgcgttccatatctgtaaatggatatgctgcgatgtcagcatcttttcctttttcctttgccgcctcttccatcttctttaccagaagacttgttgacattcctgctgcacaaaataatcgaattaccatgattgtttcctccctaattttttctcatttgttttgatggtgctagtataacaggcattttccattttgtcagtactttttcctgtttctggtttccgttccatatagacggaatttgttacataaaaaaaacagggcattctactttattgtgtaaaatgcactgttttcattttccttttttgtatattatgatactttttcgtgtatcctgttttttttgttacttatctggttactattcgtaccattacattctacaaccttaatgaaataagtcttccatatcattttgaaacagatcatctgtatcgttatggacgccctccaattctcttccgattaattccaaaataaaaacgactgccatttgggatgtcagatcataattttcgtcttttttatactctgaaacataataatttatattgcagtcactcatcttcgccaaagaacagtttgccttatttgtaatagatatcaggctgctccctcttcttttcaacttttctgccaacatcagtgtctgttccgtctctcctgatacagacaatgcgattgtagctgttctctcaccttttccacgaaatactggcgtgaacggatcatcaatagcaaatgaaaaccagcctacattattaaaatatcttgccccatactttcctataatagaagaatttcccacacctacaaatataattgacgatgcctttgtaagcaacttcacagcttcctggatattctcagcaaatgcctgtgtctgcaccctctcaaagaaatctttaaccgcagtaagatccatattgattttcttctgttctttgctgttgacttcctgttttaatttcaaacggaattcagaatatccctcgcatcctacctttttacaaaagcgaaggatcgttgttgtcgaaacatgaacctcctctgccagttcacgtactttcatatatactactttctcttcattgccgataatgtaattatatacatccatctccaactgattaaacgactttatcatctcatgcgtaaacatatgaattcagttcctttctattttttctctctattccattcttctgatcattcactcaacagctgacttgcttccttccagcactgccgtcctgctgccaggatggaacacggctgatccaacgtgatcattccgccctctgctgttgagataaatcctcctgcttccatcacgatcagtgatgctgccgcataatcccacggatacagcatcagttcaagatagactccatttgcaccggatgccacacggcagatatcaagtgctgcagaaccaccggcacgaattccaaggctgttcagatacagcttcttcgcatggtcaaagattctgtctgtatcttctgtctgataccgtgcagttccgaatgcaaccagattgtctgcaagtcctttatccgaacagtgaatctcttttccgttcagcttcgccccttcgcctttcacagcggaatacatttctcttgtgtaagggttgtaaacacagccaaacagcattcttccaaactttgttaatccgactgaaatgcaactgtgcttgtaatcaaagataaagttcgtcgttccgtcaatcggatctataatgaaacaatatccatctccaagttcctgctgcatcccgtcttcctctgcaagaaatgtcgcttccggtatgagttgacgcaggttctgaatcagataaaactgaatctccttatcatgctttgtcacaaagtttgcggttccttctttatcaaaaactgtcagttcctcgtcctgtgcctgaagcatcagttcccctgccagtgtcactatcttcatgatttcatcgtataacatgttggttgtagtcctttcctgtttattcatccaatcttacagattccatttttctatactgctgattctgctaatacttctttgtctttctatcttatcatgattttctacattaatctatatagaacaaagaatgtgctcggcacattcttgcgcctgcggcggtcgcttgcgacgcctaccttgtacgccgcagtgcgcatcctaagcggagcgtttttttatatgttaggaaagaactttcctaacatataaaaaacatctgcaaccggccaattcaggctgtgcagatgctttttcgtattttcatcctctatttcatcgcgtctttaattgctgtcagaagctcatcataagtctcatatgccggaagttccggatgatctgctttgatctgctctgtgctgcggaacaagaatcctgccttacttgcctggatcatgccaaggtcattgtaggaatctccgcttgcgatcgtgtcgaatccgatagactgcagtgctttcacagtactcagtttagactgctctacgcgcatcttgaatcctgtaatctcgccgtcctcagctacttccagactgttgcagaacagtgtcggccagcccagcttctccatcagcggtgtggcaaactgtgtaaatgtatcactaatcaggattacctgactgaatgtgcggagctcatctaagaactctctcgctcccggaagcggatcgatctttgcgattgtctcctggatctctttcagtccgagaccatgctctttcagaattccaagtctccaattcatcagtttatcatagtcaggttcgtctcttgttgtcttcttgagttccggaattccactcgcctctgcgaatgcaatccaaatctccggtacaagtactccctctacatcaagacatgttatatacatcgtaatattcctccatctgtttcgttctctaatcactttattactttactgtaatgtattgattttaacatatatgctacatatttactacttatttttttacgacagtgaaaaaggagaccagatatctgatcccctttcccatcttctattactccataataggtttcaatgcttctgcaagcttctctttctcagcttctgcctctgcaagatctttaccaagtgttgtgtagtagatcttgatcttcggctctgttccggatggacgaacgattactgtctcgttgttctccagtttgtaaacaagtacgttagccttcggaagtcctgtttcttctgtcttctcgtaatcgatcacgctggctactttgtatcctgcgatctcttccagaggattcttacgaagattttccatgattcctgacatcttatccattccgctcagtcccgggaattcaaagctatcgatcttgttgagataacgtccgtactgtgcgtagatctcttccagtctctgtttcagtgaacttccgatacttctatagtaagcggccatctcacagatcagcatagatccgatgattgcatctttatcacgtacataaggtcctgcaaggtatccgtagctctcttcaaatccgaagataaaacggtcaacttctcctgctgcctcgaggttcgcaatctgatctccgatccatttgaatcctgtcagtacgttgcgaagttctactccgtaatgctctgcaactgcatctgcaagtggtgtagatacgagagatttcactgctaccggtttctcaggcattgtgcctttctcgatacgtcctgctgcgatatagtcaagaagaagaactccgacttcatttcctgaaacaagctcataggatccgtccgggcacttcatagcgattcctacacggtctgcatctgggtctgttgcaagcatgaggtctgcacctgtctctttcgcaagattcagtcccagctcaagtgctgcaaagatctctgggttcgggtagctgcatgttgtgaaatatccattcgggtactcctgctccggtacgattgttacatctgtgattccgatgtctttaagtacacgtgttaccggtactaatccagatccattcagtgggctgtatacaagcttaagtcctgcgctcttacacagacccggacgaacctgacgggactcgattgcctcatacagtgcatccttacagtcatctcctacgaaacggatcagaccttcttcaactccctgagcgaaagacatatacttcgcacctgtaagtacatctgtcttctggatctcttcgtatacgattgctgctgcatcatctgtcatctggcatccatccggtccgtatgccttatatccgttatacttcgccgggttgtgggatgctgttaccataacacctgcgttacagttataatagcgtgttgcaaaggaaagtgccggtactggcatcagagcatcgtagattcttactttaattccgttcgctgcaagaactcctgctgctgtcttcgcaaacacatcactcttgagtcggctgtcgtagctgatcgctactgtctgtgtaccgccctgtgtctttacccagttagcgagtccctgtgtagcctgacgaacaacatagatattcattctgtttgttcctgctccaagtacaccacgaagtccggctgttccaaacttcagcgcaactgcgaaacgctccttgatctcgtcatcatttccctcgattttagttaactccggcatcagatctgcgtcttccaggtctgctgccatccagcgcttatactcttcctgatacatcttaatcactcctattattttcttaaaatgtaaaattattgcaattcagccatacaacgtaagaccgtcagtttatgaccacttcgttgtatggctgaactgtttctaaactttacaagtctagttatattataccatgcaggtagatttacagcaagattacttgtctattttaacaagcattttccattacatagaaataattcccaatacatttgcaatagaacttaataatataataatcaggcagatcggtgccagatatttcataaagaacatgtataatttctttctcttaaatgcagatgactgctcaatctcccttgcaatcttgtcaaatccaacggtacgaacgatcaagaagcatgttgcaagtgctgcaagtggcatcatcactgaatttgtcaggaagtcaaagaagtccagacatgccattccgaaaatctgaataaagctcagtactccatatcccatagaagataaggttccgattataagcataacagcaaccataaggatacagcatttcggtctgctccagtgaagttcatcctggaatgtagatacgcttgtctccagaagtgagattgcacttgtcactgctgcaagaagtaccaatatgaagaacaggataccagccagccttccaacgcccatacttgcgaataccttcggaagtgtgatgaacatcagagatggtcctgcctgcagattgtccgggtttccaccagagaatgcaaatacagccggaatgatcataagtcctgcgagcattgcgattgctgtatcgaaaatctcaacctgtgttgtactcttctcaagatcaacgtctttaccaatataagaaccatatgtatacaaaattcccatcgcgattgacagggagtagaacatctgtcccattgccgcaacaaccgtcattgctgagaagtgctttggattcggaatcaggaaatacttcacaccttcaattgctcccggtcttgttacagaataaattgctacgataaccgcaaggataacaaggattggcatcataatcttagatactcgctctacaccattctcaactcctgccaggataacgcagaatacaagaatagaaaacacgatgaaccatgcttctacctgaaaagaatctgaaataaattctgtaaaatatccgtcctgtgcaacagtctgcacatttcctttcaaatactctgcaaggtacttgataacccagccaccgatcgaactataatacggcacgatcagcatagggattattgcattgagccatccgccgatcttaaatgattttgtcttaccaaatgtctgaaaagctccaaccggactttttcttgtcattcttccaagtgctgtctctgacatgatcagaacatatccaaaagatacggtcagaatcagataaacgagaaggaagattccccctccatatttcgcagccagatacgggaatctccagatatttcccaggccgactgctgagcctgcaacagcaagcacatatccaattttacccgagaagcttgctctctttgctgattgtccattgttactcataaattgcctcccatcacataacagtctgtactgctattttcccatcttttttatagcctatactgttctattctaccattcacaatcatgaatagcaacaaaaaagagcgttgacagcgctttttaaacacatttaaaatgctatctcggctcatttttatacgtttttataatttcccttctatttctgctctttcaagcaatctctcaatccctatattccatgttccgatcttcactccggcattgatcacacgcttacatttccctattgtctcaaatgctttctgaagcgtttcttcccgaatctcctcaaacggttcttccgtgatcacttctgccgcaagtaatcttgccagccggtaatccatatcattttcatataaaacacctgccgcaaacgggatgtgctccttctgaagtcttcgataaaccgggattccagttccgccggaagagatcacgaacacttccggctcaccctccggcgcaggaagttcaatgcttccaaaaagcgggtcaaaatatccattattgattccatacaattcgcgaatgatttcttctgtaaatacttcttccggacttccgtaatgtgaaatcgtctcgcctttgacacagatgatcttatctgaaatcttctgtgccagatcgatttcatgaagagacataatcaccgtaatcttcttctgccttgccatccgctcaaggatagacaacagctccaacttatattttacatccagaaacgaagtcggctcatctaaaacgatcacatccgggtcctgacagattgctctcgccagcagaacgcgctgcttctgtccatcactaatcgcattaaaatcacggttgccgagctcctgcgcatgcaccgcctgcatcgcctcttccaccagacattcatcttcctgtgtcagaatcccaagtcgtcctgtgtaaggatagcgtccggtcgccacaatgtcatgacaagtcatcaactctgtcttgatccgatccgtcaacacgaccgccatcttagacgcaagctttttgtacggcagtttcaggagagaagtatcgtcaaaaaatacatttcctccaacgactttcagctgtcttgtaatacttttcaaaatcgttgactttcccgaaccattcgggccgatcaaagtcacgatctcccccttgttgatcccgatattaatatcacggatcagggagtttccattataacctaccgacaggtctttcatttgaaaataataatctgccatcttattttcttcctcccttcggtatcatcatatagataacgatcggtgcacccagaatagaagtcaccgtactgatattcaattccaccggtgccagtgccattcgtgcgatcaagtcacagatcatacagaacacagctcccataaagaacgttcccggtatgaccacgatcggttttgacgttccaaatgccttccttgcaagaaacggaactgcgattcccacgaaggaaatcggtcccgcaaatgctgtcacacacgctgacagaatactggaaagcaagatcaaaatcacgcgaaacgtcttgatgttgactcccatactctgcgcatatgcttctcccaactgatatgcactgattggtttggacaggaaaaatgtaaacagcaccgcaagtccgacaaccactgctgccacacgaatattgctccaactcattccggaaaaacttccctgtgaccacccgtgcagattcacaatatcagaatcatccgcaaatgtcacaacaaaatccgtgatagccgaacagatatatccgatcatgatccccccgacaagaagagacgccatatgctgcacttttttcgacatcagaaggataaatcccgtcgagatcagcgacccgataaatgctgcaagaatcagtgtatacgaagaaaatcttccgatatatttcaaatacacgatcattgtaagtgccacgaccattttcgctccggaagaaattccgagaacgaaaggtccggcaataggattggaaaaaaatgtctgcagcaaaaaacctgaaagagacaatgcaccaccaagcaatgctgccatcagaattctcggaagacggatcttccatataatattgtactctgtcgccgctccttctttcagaaagagaatgcgcagaatcttaggcaccggaatatgaacatttccggtattgatatttagcactgtcacaacacaaaatactgctgcaagaatcagaaataccgctgtgtatcttgtacgccgtctgaaattttcctgatgaaaacttgtctgctccattcttctactccatcttttcaagaaatgtcatctgagatgcatcactgtctgtcagcatcagatgcatatctttgatcagctctccgactgtatctgttgcctgatataagttctttccggtataccagacatttccgtctttcaccgccttgaattcagagaacaattcattctttgcttccaactcactgatactatttatctgtccgtcgatcgtcccgttgtagatcagataatctgcatctacagcagtcgcatagaattcctccatcgtcagtttaacagatggtgcgttgctgtccggattcttcagatctttgaacgcatatcttccacctgcgatttcgatcattgacggaatataatcgtcagattttctcacaacaattgaaccatctgtactcacatagaaataagcaaccgtcttttccgtgttctcgaatcctttcagttcctcgatcacatgagcctgctggtcaaaaaatgtatccgcttcttcctctttattcagaagcgccccataaagcttgatccactcggttcttccaagcggatgtgactcataactggagtagtctacaaataccggaatcccaagatcttcgatcatttcctgtaccttcggtgtatgaaggatcatcgttgattcgattgccagatcacagtctccgtcaacgagagtctcataatccggttcgctgtattttcctgcaaatgtcatcgctccggattccattgcttcctttgcactctctacataccagccggaagcctcaagtccggagaattttaccttgtcaattccgccgattgcatcaaacagagacatggatgctgtcgccgccatataaatattctctgtcggctgctggatcacaacaatatcatccgccagattttccggttcttcttcaccttccggaacaatcagatattgcttatcttcatggacatcgatcaacttatatccatccttataatagtatacatcgaattctgtcgcgtaagtcagatccattgtagattcataagtaagtccttcaatctccggtgctttttttgtcttgtcggctacatctttggtcttatcctttgttacatctgtacctgctgaattattaccgctgtttccaccggaggctgcggtagaaccgcagcctccgagcagaagtgcagctgaaagcattaacgctgtgattctgcatcttcttatcttcattctatttttctctcctatttctctgccgctgctactgccgcatcaaacttctcgttcgtcagctcttcacatccgtagagaacaccgtaaaccttgatccactcctgctttccaagttctgtcttttcctcggaagaacgatcaacgagtaccggaattccaagcattgcaagcttttctgtcagctcttcgaactgttccgtcttctcttctactgtcagagtctcttttgtatctttactgtctttatctactattttgtcagtatctttcgctgcattttcctcagaatcttctcttggaagaatatctcctgtaaacaaagcaagattcacttcactcttcacaaggttcttcaacttcagcttgtccgctgttcctgcatatgcaacttcagcattcttctctccgtcttttgctttcatcttatcagcaatctcggatactgtacagtctttgctcttcattccaactgccgcaatattatcaagaagatcgagatctttcatcatattcagaatctcatcagactctgcataagtatgatctgtcggttttttcacaatgatcatatcctgctcaagaccaaccggaacttccacatcctccggaacgatcagatatttcacaacatttcccttgtaaagctctgctgccagttcctgttcgcttgtgccgttgttatccgaagctgcggattcctcggcagaagcatctactttgctttctgcatctgagttcttagaatcttctgatctattgattgtaacagaagctactttcttcttggaagacttctctttatcttctgcagacttctcattttcagactttgtttcctctgctttctccggatctctggctgtatctttcgtcatgtcgatctcaagaagtacgattccctgatcataatgataaatcttgaaatattctgcatagtcaagctttgtctctgactgatattccaagcctatgatttcaggtgctttttcgtccaacttctggttactatttgttgaagcaactgttccgtttgcagatgttcctccattagccgctgcaagataaatgaaaatcgtatattctatctcatgtgcgacagacattttgtccgtcattccaataatcttattgttctgattcaacgcaaccgggataacagctgtcgctgatccgccgccctttgttgtgtaatacttatttccgttcgctttcacatactgataatgatcactgctgaacacgagtgttgcataagcctgtccattctggatcgtcactttattacaagtaatctgaaccttacctgttccgcctgaccaggtaaaacggtccggagtatatacaccgtctttcagtgttgttccactgtctacatgagaagtagagccacttgtatcggattcgtattttgatacattatctgcttttccgtcgtttccatctgtttttcctgaattagttccaggtacagaaccgcctgggaaagcagaattgtttgttcctgtattacctgtattgttggaaccaccagtagttccggaatttcctgtgtttccattgtttcctgtatttccggaatcgcctttattattagaatctgtggaattaagatcggcaatcttcttcattgtctctgactggaaagtcagcgttctgtcataccagattccttttttaatggaataggctgctaccgcgagttctttatctaatgcttctaccggaacagtataagtatattttccttcttcatttacctgatagggaatccaggatgactgatctgcgcttgtagcctcttcctttgttcccatatacagatagccgtaaccggttccgcttaatgtaagcacggcactcatttttccgtctttcgctgtcaagatacaatccactactttaaacatagaagaactggaaactacgtccatgctgtagattccgttggctactgttgcttccggtgtcggagttggcgttggatccggtgttgaggtttctcccggattcggaatgtacatccataagtactgtttgtcataccaggtctgatcttttgactttctcaaagataccggaattgtctgacctgctttttctttcggcacattgaaatgaaatgtccatgcaccttcttcatcctttgttccttctataacagatgctttcaacaagtcatcttttgaaccaagatatagcgcatcaaatcctgtgttgtttgtcttgatcgtaatatcaagttcgccatccttttcaacaactgttgattcactgaccttgaacatcttgaactcttcagcgtcttcttttactactttcacagattctcctgttacagaaggcgcctcctgcagtggcggaagttccggttccggagtattcgtagaatcgttagaatctgtagaaggttctgacttgcctgtctcatcttttatctgtgtatccttgttatcagttttttcgtccgcaacctgatctgagacagttgtgcctggatttttcccggtggtttctgtatctttctcttctgagttattttctaagttgttttctgaattattttctgagttattctctaaatctggttttgtttctgcttcgattgaattctgattatctgatttatccgaagaattatcaactttatcagattcctctgtctgatcttcttttgttaaatcgtcatttcctttatcttctttaacatttcctgcgtcttctgtctgactctcatcttgtttcttatctagatcagcttcttccacctcatcagtttcctgtaaatttgtctcatactgctgctcattttctgccgcatatgttcttgtataagacaatggtgaaatcatcatagaacctgtcagcataagcgcaagccatctgctcttatttttcatttcttttttgtctcctcttaagttgtgaattataaaatacggaaaatggatagaattatcttgaatcaaatgaatgattgctggtcacacgtaatgcgaacagtaagaatggttctttcggtacaatcaattactcgtgatctggaattcgtatattccccgcaccaacggtcggcaggtttcctgacttacagatcttctatacagaacaccttcccggtctcccagtggatgtgtggactctccacacttgtctgtataagagcggtcttctgaaatctaatttctaagaagaccgcatctctgctcacagtgacgagttcgtacaggtcttgcacctgtttcccttttacctgtttcgatcaggatatggaaatatattccctgatcaaacagcaccgaacgctattatttctgactaactataacatttcattatattgaagtcaactattccgccttcacggcccagcgcatcttcgtagatcttgctcttccgttctgtgcacattcctgcgctgacgggcgtacaacgtcccttgcatattcggaataaattccttctttatatcctgctttgagtgctttctttacaagcttgtcctctccggaatggaatgtaagaattgctactcttccgcccggtttcaatgctcccggaagtttctccatgaattcatacagcacttcgaactcattattgacatcaatacgaagtgcctggaatgttctctggcaagtctttttgataatgtccttcttttctttattatttggaaggaaatctaaagtcttctcgatgacatttctaagctttgttgttgtatcgatacgattgcctctgcgaatctcatccgtgattgctttcgccagctcttcgcagtatggctcatctgaattctcgtaaagcattccggcaagctcttcctcggaaatgttatcaaggcgctctgctgcgctgattcccttctcctggttcaatcgcagatccagcggtccgtcgactttgaaggaaaatcctctcttcggattgtcgatctgcatagaggaaactccaaggtccgcaaggataaaatcaaatcctccaacttcttttgcaatctcatcgatcgtgcagaagttctgcagacggatacttaaaatgtcttctccgaatccctgatctgccagacgttttcttgtcttcgcagactcttccgggtcaacatctgttgcatagatgtgcccctcacctttcagacattccagcattgctttcgtatgtccaccgtatccgagtgtcgcatcgaatccagtctcacccggctggattttcagaaaatcaaggatctcatttaccatgatggaaatgtgcattccggcaggagtatttcccttctggattacatgcgcgattgtatccttgtatttctccggctgtaactctttatatttctcctcgaatttcttcgggtattttcctttatatctcacacgacgcttgtgcggtgtctgtgattcctgtgtgttctgattgttctgttcgctcatttcgctctcctgttcttatctttacaacgtatgtacagtataccatgaaagttattcacaatataccatgaactttgaaatgttttccacataagtcttcatatttttcacctattcacatttctttaccggaacctgcatggattcactgttttatccggctgcatatcttactgccacgttcatcactccggcaagcatcatcacaaccaccggattcagttttgtcttacgaagcaataacaaacagattccaaagatcaccaccatagaccattttgtcgccgcaaactgcacaattccatctgtccagaatgcagtgtgcagaattgcgattcctgcggatgcgatcaatgcgacaactgccggtcttaaggattccagcacgctctggaacattttcattttcttatatcttaaataaaaccatgcgatcaaagttacgataatacaagacggcagaatgcacccacaagtcgccacaacagatcctaacactcctgcaattttgctgccgacaaatgttgccgcattgatcgcaatcggcccaggtgtcatctgggaaatcgtgatcaaatctgtaaattctgtcatcgtaagccaaccatgctgtgtcacaacctgttcttggatcagaggcatcgccgcataaccgccgccaaagctgaacattccaatctgaagaaagcttaaaaacaatttcaaataaatcatttctcttcacttcctttcttcgtgatctttttctcaattaatgcgcggagtactccgacaattccacagatcagaatcacatagactacatttacctcaaatatgcaggaagctataaatgccccgaccataagtacgtatgacaaagcatctttcttcttcacgattccggcacccatgtcatatgtcacagatgcgatcacggcgcccactccggcctgcattccttcgagcattaagctgatgatctggttatttcgaaatgcctgataaccggcagaaagtatcgatataataagaaatggtgggattactgtcccggcaattgctgtcagaattcccgcaattccagccagtttatatccgattacgattgctccgttcactgcgattgctcccggtgccgactgcgcgatcgccacaagatccagcatctcctcttcttcaatccaatgatattcatctacgaactttttcttcatcaggctgacgatcacataacctccaccaaatgtgaacgcgcttaaataaaaggttgaccagaaaatcttccacaatttcttatcttgttttttcccttgcgttttttcttgttgttcttccatatatattgtcctcgtatattatgattatgcgaattgcgtagcactagaactcccgccacactatatgctattggcaggcaaaattccctaactatgatattctttctcttgtagtctatcgcaatcaaaatgattatgcaatcgccttgaattttttacattatattttcctttttgaaaccttaattttatctgaattttccctatttggaaaatgattatgatacaatgagaacagtaatatttatcataaaggagattgaaattgaaaaacctattttttcgattctcttgtgccgttctcctgtgttgctgcctgaccggatgcggtagcatacagcacaaatccagtacggacacggcccaggcgcagggtactaaggcaccacccaagacagcggatgatttttctatctcatcagattctgaaaatgaaactgtagatgaaacttcttctgctgatgccgccaccccatctgcttctgaatctgaatccgtaactcagcaggaactgctgaccggcgcagcggctctttacagcaatggacaggagatcagctttgacccttcctggcaatacgcagacttttctgcaatcaattctggaacagctactatttatcttgcagattctgaccgcaaggatatcgtcgtcggcgtgaatgccggacatggaacttccggtggtgcttctgtaaagacacagtgtcacccagatggttctccaaagacaaccggcggaagcactgctcagggtgcaacttatgcgactgcagtttccgggggaatgacatttaacgatggaactgctgaaagcactgttacacttcagatggctcagattctgaaagataagctacttgctcaaggatatgatgtccttatggtgagaaacagcgacgatgtccagcttgataatgttgcccgcaccgtactctgtaacaatgtagctgactgtcacatctcactccactgggatggagatggattggggtatgacaaaggctgtttctacatttctgtgccggatggtctgaaaagtatggaacctgtcgcttcccactggcaggaacatgatgcacttggagcatctcttgtagaaggacttcgtacagaaggattgaccatttaccaaaatggttctatgaatatcgatctgacgcagacttcttatagtacgattccgtctgttgatatggaacttggaaatgcaagctctgaccacagtgattccacactaaacagtctggctgatggtctggttcttggactcaatgcttattttggaaattagagttcttattgagttatttattttattttttaaggaggttattatggagccactcattcgtgttaaaaatatgtacaagatctacaatcctggagaaaatgaagtccgcgcactggatgatgtttctcttgagatcaaccagggggaatttattgccattgtcggacattccggttctggtaaatctacatttatgaatatgctcggctgtcttgacacacctgattccggggaatattttctggacggaaaagatgttgccaatctctcagacaatgaactgtctgatatccgcaatcacaagatcggcttcatctttcagggatttaatttgattccaaacctggatgcacttggaaatgtagaacttccactgatttaccgcggacttggaaagcagcaaagaaaagagattgccggggaagctctatcgaaagttggactggaaaatcgtatggatcacagaccgaaccagctttccggtggacagcagcagcgtgtcgctgtagccagagcaattgccgcacagccgccgatcatccttgccgatgagccgaccggtaacctggacagtaagtcgactatcgagatcatgaatattctgaaagaccttcataaatctggaagaacagttattatcattacacatgatgatgaaattgctaatcaggttgaccgtgttgtccgcattatggatggaaagattgtgagtgatagtgtaaatccgtagcaatttaaaactttacctgcaattacagagagagggcagtactttacgatttctcaatcgttgaagcaccgccctctttctatgtttcttattagatatttcttactggaatttctaattacttctattcactttttattctactgatacaagctcaatcttgaagttcagttcttttcctgccatctcatggtttgcatcgaaagtgattgttgtctcttccttagctgttacctttaccgggaatggctgtccatactgattggacaggtaaacctgctgtcccacttcaaggtcttcagatcccgggagttctgcaatctctactgtgaagatagcttccggattcggcattccataagcttcttccggcatcagatggatgtccactacctgaccaacttccatatcagctactgctgcgtcaaatcctttgatcatctgtcctgcaccgcatacgaactcaagtggctctccacggtcataagaagaatcaaactgagttccgtcattgaatgttcctttgtaatgtgtacggcatttctttccaacattctttccttccattgtagtgtgtgatccgcatccgccaccgcagctgcttccacaagaatgtccctcttcatgatctccacaggaatgtccttcctcatggtgatgatgatcacatgtagctcctctggatacaagctcacctttcaggtatgcctctactgcctgatctgcatctccctgagcgcctgaacacaattcaacgccggcctctgcaagtgctgtctgagctccgccaccgattccaccacagatcagaacatctacgttctgtcctgcaagcagtcctgccagtgctccgtgtccttccccattagaaccgatcacttcactggaaaccaccttattatcttctacttcgtacactttgaaagtctctgtctttccaaaatgctggaaaatatttccgttgtcataagttactgcaattttcattgtaaaatcctccgtttcaaaattccctgtcagactagtataatccattacgcaggtaaaagcaacctttgtgtagatgcgaagttgctccttgtagcagttactgttcacacggtgtgcgaccagcaacgcaaacagtatcattgacacaatctcctcaagacactatacttgttataaaacttactccaaaccatcagaaagtgaacacaaccatggaatatgaacacattacccattcctttgaaccaatatataatgaagactccaagattctgattcttgggacgcttccttctgtaaaatcacgggaaaataatttctactacggacataaacaaaatcgattctggaaattgttggcgaaactttgtgaggaggaaactccgcagacagttgaagagaaaacagccatgttgctccgccaccatatcgccatctgggatgttattcaaagctgtgacatcaaaggctccagtgacagcagtatcaagaatgtgacaccaactgatttgaaacaaatcttagatcattgtcagattcgacaaatctatgcaaatggaaataaagccggagctctttataagaaatatcagcagccgctgaccgaaagagacatccttgtgcttccttccaccagcccggccaatgccgcctggtcactggatcgtttgtatgaaaaatggagtgagatactgaggtgaattatattgcctcagttctcactccatttttattcgaataaattactatttcaaacaacttagattattcgctaacctgttctcttctctgctcaaacactgctgccagtctcggcagaatcttattgcacgccatcgtgtatgccgcgccaaatacatttgccccaatacgaagcgctaccgcatacggcattccgaacaagccggatgcaatcgacaatgcaccaaatgtattaaatgctgtctgccatgcataccctgcagaatacccgactccaattcctccgatcattccgatgtatggatacattgactccggaagcaccaaatacaggataacaaataacagacatcctactatattaaatgcagctctctttcctgctcgttctttacagtcatccgggaatggaagacaaacagacatgcttgcgatccccgcccacattgctctcggaagtccaagcaacgacatgaataacattgcactggaaacaactaatgaaagacgaatgtaccatctgtttcttgcagagctgatattgaactcgcggaacaaatcaagaaatgatcttctatacggtctgttcttctgattcttatagaagattgccatacacaataccattccaaccaaaaggccagccacgcgatacaagtactcctgtccggtcacatcatatccctggagaagaagatatccaagaacaaatgtagaatgattgtacatgatcacattatgacatcccagaatcataagaagcaaaatacatactatattaataaagaatgccggaaccggtgacaccatgttcgaaagcttcggtcctgcaatcaatattccaaagattccgacgatggaggctaatccgtgcgttgtacgaatcccaaaatctgcctgtcgaagaacaagcaccgcaagaagcactgtaacgcctactacactgttgttattccctgtgaaatgactgtataaagaaactaccgccacacaaaatgccattacaagatagactttaaaattataaataagaatgtggcgatacctttccttcttgtcttctgtcgctttgatcagctgcttagatgcaactgaactgagctgtaactcctgataaaatgtcatatatctcttcctcccactgttatttttcttcaaaatatcaacgagaaactataatacaaatccatctcggagtcaataaaaattttattaaagttttctgataaatctgaattattcgaacaatatatagaatttaatttttagactttacaaaacgcaggctctatgataagatagtttgtgtcgagcggaagtggcggaatggcagacgcgctagattcaggttctagtgggagttttatcctgtgggagttcaagtctcctcttccgcattgatagaatgtaagagaaatccttagttcaaggatttctcttatttttttgttatctaaaattagcacattttgggttacctctgtttcctaattaaatttctgtatgaacaaagaatgtctcttttgagaaatcttgaaaaggagaattagcctatgctgaccattactgacctgattgcagtgatctcactgtgtgcgactttttatagtcttggttacgtgcgtggaaagcatgattccaagacgcaaaaataaccgcccatcgtccttgcaaaacatgagcggttatttttaatcaaacattttttcatcaggcgaaccgtcatcagtagcacctttctatttattagaatagcatttcttttttcttatgtcaaataattcttctccttttgtacattctgtgtctttaatacgtgacttatattgcggatattcagtaataaaccgcttaattacattggcatcattccagtaatgcattggaaaaatgacattgcaatctacatttttaaggaaatacagaattccgtcggcatagtgattttcctgcctcggatctaaaggaacaaatgcagcatcaaaatgcatacccttaattttcctgatttctgcacgatatgctgaagtaagtctctggttgtcagctttcggttcaccatcccaataccagttatttaaatcgccggcatgataaatggtaccttcctttgttttgacaataaatgctacaccactatcattagacagcaatgtatcaactttggtatcattatccagattataagtctgatcatgataaacatatgtaatcttcatatctgtcaaatgatttctttttcgtatatcattcgccaggactgcctgataagtcatccccatatcatcaagaatctcaaaaatttgagggttaaaatgatccttatggaagtgactacaaaaaacgattacttctttttccttatcaaggtgcggtaattcacccttataataatcaaaaatatagtagcaatctttggtttcaagtaaaaatccactgtggttaatgtaagtaattttcataatatctcctgtataaattaatattggaaacttcataagaaaattctgatttctatgttgtttaaattcctaataaagaatcaatctatgattgatttataataattcccaaaatcggccagtgcatctataattggcagcatttcttttccaagttccgttaatccatattctacttttggcggcatctcctgataatcgtgccgataagcaagcccgtcatcaatcatttgcctgagactatctgtcagtaccttctgtgaaatgccttcaatatctctctgcagttcattaaaacgccagggacgttcttttaaattacgtataatcaaaagtttccattttccacctataatggacacggccgttgctaccggacaaacaggaagttcatcttttgtcttcatttcacattcacctccaattttataataacacatacattttaaatagtgatctcactgtgtgcgactttttatagtcttggttacgtgcgttgaaagcatgattccaagacgcaaaaataaccgcccggtagcacctttctatttattagactagcatttctttttttcttatgtcaaataaatcttttaagattctctatcaccccaacgccacatccagaaccatcatcaaactgaacccaaccgcaaagaaaactgtaccgatattagagtgctccccttgcgacatttccggaatcagttcttcaaccacaacataaagcattgctcctgctgcaaagctcagtaaatatggtaatgccgggattatcagctgcgcagcaatgattgtaagtactgctccaactggttcaaccacacctgaaagcacacctcctagaaatgccttccccttactttctccttcggctctaagcggcagagatataattgctccttctgggaaattctgaattgcaattccaagtgataaagcaagcgcactcgctgctgtaatctttgtatttcctgcaagaagacctgcatacattacaccaactgccatcccctcaggaatattatgcagtgtaaccgccagtaccatcatcgttgtacgcccaagcttacttttaggtccttctgactgttcacttcctacatgaaggtgtggaatcaaatgatccagcgcaagcaaaaacaacacgccaatccaaaaaccgactaccgccggaaaaaatgataaagccttcatattttcggattgttcaatagccggaatcaaaagactccagatggatgccgcaaccattacccctgctgcaaatcctgcaagtgcacgctgcacctgttttctaagtgtttttttcataaaaagcacgcatgctgcaccaagcgttgttccaatgaacggaatcagtatcccaagaaaaatttccatttacgcatctcctttcttggttagttttaactaactactcattttctaaaaatccgtgtaaaaccgaaactgtaattccacacggattattttttctctagttcagtatatcacttaaggaattgtgtagcaagaagcaacttttctgcctgatcacttccccatccaattttcctgtttttttcacagttttcactcaacctttcgatttctgtgctataatatggcattgcgaaaatatacgatgcttaaacagaggtgaattacttgaagaagaaaacgcttgtgcctcttatcgtttttttactgggcatgtgccttgttggtttgattgtatacaaaacagatgccattgaaaaagaacagaaacgcacgaccgcacaattaaatgcaacaacttacggtgaacgtataaagaatgagattactaatgggattgagatcactgatacgttacaacaaatcttgatcagtgaaaatggagagatcaattattttgataccatttccaaaaatattatgtccgactctatagaaagtatacagctcgccccaaatggtgttgtgacagatatttatcctgctgaaggaaatgaagcgggcaagattgatctgctccatgataaagatcgtggagaaatttcctgttatgcgagggataaccatactttgatcacacaaggtccctttgaattaaagcaaggaggctatggaattgcagttcgcaatccggtctacttaaaggatgaaaatgggcaggaatatttctggggatttacgattgtcattttgcgtgttcctgatattttttcagactcaatcaacgcactttcggattttggttataaatataagctttcgaaaacatcctctccctggagtgatacatatgaagttgtttatcaatcagatggaaatttaacaaatccggtttcttatgattttacaataggtgaagagaactggaaatttgaggtaatgcctgtaagtgggtggagaaatgcgaaacttatagctatagttatcggattttttacttctatcgtatttgttctgtcagttcttatctgggtctggctaacatcaaaagaaaataaaaacaaattccagaaactggcacatatggattcacttaccaatatttataatcgttacggatttgatgaattagtagaagaaatgattgctaaaaatccgaacgctcattatgtagttgcactcttcgatatagatgattttaagtttattaatgatatctatggacatgtttacggtgacagagctttaaagaatcttgctgacagtatgaaaaaatcttttccatcggatgcattattggggcgaaacggcggtgacgaattctgtattcttctccctaatcgcacatatgatgatgcgaaagaacagttacaacaattcactatgcttccaaagatattctcatacaagggaaatgactacccattttatatttctcttggatatgctgaataccctaccgctgcatcaaaccgtgcgcagctcatgcgctgtgcagatgccgcactttatgaagtaaaactacatggaaagaatggatgtatggcttacaaggaaggacttcaatccggtgtccgcaaacaacttggatttgcactcaaggatatctctgaacatcttcctggtgcgtttattatctacagagcggataagggaaatgacgaactcttttatgcaaaccatgagtttctccagatggccggatataaagatatagatgagctgtttaagcttacaaagaagagctttcgaaaccttatccgggaagatgagcaacagcagattgaggcaagtatctggcagcaaatcgacagcggcaatgaaaatgactatatttattttcatcttcaaaaagctgatggaacttacctttctgtacttgaccatggaagaattgtagaaaaccagcaatatggaagagtattttatgtgttgtttatggactgggctgatatgcatatccgttacagtgataagttctctgaataaataacagatggtgtgggatcatatcaaaatcccacaccatctgttatttctttcaagaatgcctttttataaatcttcctgtattttgacgtcactgttatctgccagacactgttttaacacagtgatcattttttccccatccaatggttttgcaatatgaccgttcattcctgcattttttgccatctgtatatcttccgcaaaagcattcgcagtcatggcaataatcggtatggcggcttttttccggttttccatctgccgtatctttgcagtcgcttcatatccatttaacctcggcatctgaatatccatgagaatcaacgcataatatccatcctctgcttgtcccagcatatcacagcattcctgaccatcttttgcccagtcagtcaaaatcccctcttctttcaacagttctatcgcaatttcagcatttaattcattatcttccgcaagaagaattcgctttccaatactcttatcagatataacagactgttccgactctttctttttgtatacatcctcttctgatgcaatctccagtggaatttccactgtgaattttgttcctttcccctgttcgctttctacataaatctttccgcccatcagttcaacaaaagatttcacaatagaaagtccaagaccagtaccgaccactttattctctgtcgctgtatgttctcttgaaaattcatcaaaaatatgtggaaggtattcctgcttcatccctattccggtatcttcacagatgaatacataccatgcttttttatcatctgatgctgtttccgtaatatttacatgaatcgcctgaccgtttggagtatatttgattgcattactcactatatttaaatatatttcctgaagttttgtcttatcacagactgcatatttatgctgtatatttgtatctatcgaatattgaatttccttcgattggatatcagattcaaatactgtatttacagaataaaacatttcgctcaaattctctgcctgcatttttaacacagctgttccactttcaatgcgagccttttccagcacctgatcaataatcgtcatcagaaaattgcccgaggacttgatctttcctaaatactcccttgctttttcctcgttcttaagattctttccgagaagatctgaaaatccaataattgcattcatcggggttcggatgtcatgactcatattaaacagaaatcgtgtttttgcctcacttgcttcttttgcctgttctgccgattttttcaattcagctgcatactgcttctctcgacgttttttgctgcagatctgatcaaaaatagtagcacccatcatggcaattatgagggctgatacaataacagcaatccattgataaattgaaatccatccctcctttggtacgatatccacataccatgtgtaattaggaatctcacactctaccgtaaggctattctcaggcatatgttcctgattttgagtcagaacaatccgatcatcggcattctcatcattcgtccatatctcataacaataggatgcttcacttagccgttccatgccaatttcatctataaatttatcccagtcgataactatgatcacaaacccccaaaaggtgtcatttcctgtaatattattctgataaaccggatggaacagcaaagctcctgttcctccctgttttaattgatatggacctccaagagtatattttcctgtttctttggcacgctttgcgtctccactgcgttcatgctctgtcagcatattcattccaaaagcctgatcatttccctgctttgggaaaatatcagtaataaccccattcggtgcgagttcgaatgcttttacaacacctgcttcattcggaagcatttctgccaattctgagaatgtagtctgattcagatcatatcctgcaagaatcacgttttcaagaaattctgaaagttcaacatactgatctaattgtgcattgatccgctttactgtactttgtgcagtataagcagctgctgtctttttttctttctctatgttctttacaataatacagcccaaaagaagtgctgttataaaaataaacaagccaatgatccaactgtatctttttgtctgtttagaactggtacttcccttttccatttactgttgcctcttcatcttcaatgttttctgttgtttttaattatatcatgtcatgttttttcatgtctatttttttctacagtaaacggataacaagttctttctttgtctgctgctttccttcgcattatccttaagctatttcctttttcattgccctgtaaccgatcagcactgtccatacatatgcacatgttttcggaatcatcagcattccgatcatcggaacaacatcagcccacagtacaaccgggatatagaatgcaaagcttaagacgatcgtcagccacatccagcagaaagactgatcattgctttcttttgcacttttgtaaaacaaaacgatgataagtaatcccatcagtgcaaacggaatattacggtaaatgccccaggaaagcggtgcttctgcactgagccattcattctgtggcatcatacacagaacaattcttaatcctgcgagtagatagatcgctgctgtagttgcattgtgtcctttgatctgataacgttcacgccaaatatagtaaagaataacataaaaaattgtcattgtaacggatgtgatccatttacctaatcctaactgtacagtgaaattctcaagacctgttgtacaaagtgcaaatgcacgtggaaccaggtggaatgcatctccacttcctaaaagaactgccatgattccaaacatggtgaactgacggtttcctttgctcttacggatcatcaagattccgattgtaattaccgagattaaatacacggcgtcaaataaagtttctgcaattgcctgcataataaatatccctctttcttttgaatttatattgaattatgttgttctgataaaacagacctgcacaattacaatcacacataactatgcgtacatgaacattgttcattttcaatcaaaaattttcccacagctactgtgggagaattttaatacaacgttttctttacaagcatcaatacagatgatggatcataatcctgccggatcatcgacaccagaatcagggaaaacagtatgtctgcaaactttttctctgtaaattcctggtcaaatacatctgcacggaccttcggatcatttcctaagacctcacataatccattcagaatatgtccccatgtcttcatcattcttttcttcccacttgttttttcatctctcataaaaccaaatgaatgtaatgagaagaacccagggaactgacgattaccgtattctaatcgttcatagatccatgaaatacaagattcgacatcgtgaaagacctgttcatcttccgggtgaaaaaagatttcatgccaaatactctctattgtatcactgagcaaatctgccttggattcataataattataaatagtacctgctgatacagaacatcgggacgcaacagcccgtatacttacggcagcccatccattctcctttatcagatctctgctggcagctaatatgtcttcttttgaagtagcaagatgattcacgatctcacctccgatatctcatttctgtattctaaatttataatgaatactgttcattttgataatatacagcacttaggtaggtttgtcaagactgttttaacctatttcttttttcttatgtcaaatagatcttttcagcattaccagcattgtaataaagcacaaacttccaccaatcacattagatataggctctgctaagaacacccctctcgtccccatgtgaaatgcatatgggaacaaatacgtcagtggcacaacgataaatacttttctaagtaatgaaaagaaaattgcctgcttcttcttgttcaatgatttgaaaaccgtctgcccaacatactgcagatccataaatataaatgctgcgaaataaagtttcagtgcatctacgcaatcagcaagcagttctctatctgtgctgaaaattccgattagaaattccggttcgaaaataatcacgctccacgtaattgctgtatagatcaatatcatgcaagtcagtacgcggatggctttcttcactttcattgggcgccgggctccataattatagctcaagatcggagaagttccttcattgatagcatagatcggagtttccaccatctgacgaacacttgatacgatcgtcataacagagatatatacatcaccgccaattcctgataagacgctgttacaacatattgttaccagactattggtcagctgcatgataaaccctgcacttccaaggctcacaatattcttcgcatcatctctacatgctttccattctccttttgacagcacccgcactttcaattccgctttctttctcaagaaataaaatacatatgctgccgataaagtctgggaaatgattgttgcgatcgccgctccttttatgcctaaattcaatccaaatataaacaatggatccagaatcagattagcaacggctccaattgtaaccgataacattcctgaagttgcatatccctgcgcattaataaatgggttcatccctgttgcaatcatagatgggactgttccgatcaaataaatcatcatgtatggatatgcgtaagacagcccttcttccgacgccccgaacaacaccagaatcgaacttgcgaacagcattccgatcaccatcaatgccactccacaaatgcacagcattgaaaatgatgtattcatgatcacttctgctttttttatgtttcctttgcctcggttaattgaaaataacggggcaccgccacttccaaataaattgctgaatgcagtgatgatcacaataatcggaaagcacaagcccactgctccaagcgctgttgttcctactgatgggatcctggcaatataaatccgatccacaatgttgtacaaaagactcagtatctgagccacaagcatcggtaacgctgctcccaaaatatttcctgtaactgttccgtggtcgaaatcaatctgtttcatctttataatattatcttaaaccaatctttctcttcaaattcaacaaccgtacaatcatttgcataagtacattccggaagtacgatcattgcatgaagtacctcattattcgccggaagtggacacagatgccagatcgctgcattgatctttaccatgcatccctttggtacaaggaaagccttcgcaagttccggaaccggtgttccgccggaagcaggtgcaacatggataagcatgtcgtcatcaagagcaacaatcccttcccatgtagttgtatgatattccgccatcttgacaattctttcgtccttgcgaacttcaatcggtgaaaatgccattgttccaacacaggttcctgagatacggtccggatagaatttatgaatctctccctccagtggatatccctctggttctgtcatactgcaaaatgttccgtacggtgcaaaatctgctgcattaatctttactgcttttacttctctcatcgagtaagtcctcctttgttttaatataatcgtatcgctgatggaaagcagatcagcttgctccactctcactaccaactcatcacgtctagtatatcataattaattccgaccagcaaaatctcaccgcaaaactctttgattgccgccgggtagttccgtttcttaatctgtgctgctactgcatccacattcatatttgcccagcaacatctatcttttcacatatctctgatttctgctgcgtggcttgtcaggaactgtcatctgtatcaattgaagttctattgccggattcagataattcttgcgaaatgattcctttgactttagacccaacaactccatcaaagtaactgcggtgtacggaacttcgtattccataacatctaataatcgttttacatattctgatatattttccctttgtccttccgactgtaacagaacttcttttaaaatctgatcaatctggcgcaacataaattcgataaatagatttgaatcaccatttacatggcattgtgcgatcacattgtaatattcttcctggaatctttcaatctgactttctattggaatgtattgaaagaatggcttccaatttgctaaaagacaagtatgccacaaccttgccatgcgtccattcccatctgcgaatggatgaataaatacgaattcataatgaaatacgcaggacaggatcaatggatgaacttcttctttttctcgttccatccaatcaaacagttcttccataagatgtgggacgaatcttgccggcggtgccatgaagatgcattcctctccattgaaaacaccctcttcgccatgtctgaaacatcctgattcatctatcagatacttcgtcataatcccatgtatgtgctttaattcttcaatatcataaggatcgatctcatttattttctcatatgcttcgtatgcgttctttacttcttgtatttccttttgttctccaagcacaagctttccatctatgacatctcttacctgtccgattgtcaatgaatttgcctcgattttcaaagaagaatagattgatttaactctgttattttttctcaaatgtggctttgactccagattttttccagtagtgattcttcctactttttcagaaattgatgcgactaaatccagcattgtatttgtaagtttgaatggtggtgcataagtattcatatcatttcccctcgtataacttacttattatcttgtacgttttcttactatattatactagttttttatttattttactataacttgcttgttatcttatacgttttcttgtcttttattaatttgcgaacatatcaagacttctctccacattttcctcaaattatcatcacaatcaacattttctcttgacaattcctcaaacctccatataattatctatggtaattaaccttggtaactatataggagttttattatgacaaatgaaaaaatcaaacgcatgctcgatgcatgttatcaggcaaagcgaattcgtgagatgctccctccgcttccggaaggtatcatgtcatctcacatccgctatatggatatgatccaggagcttcagaaacagaaagtccatgtaagagtttctgatttaagtgacgttctgaatatcccgcgaccgggtgtcacaaggacaataaaagaaatggagaagaaaggattggtacaaaagacagcctccccagatgatggacgtgtcacatacttgtctttgacagaacatgggacggaaatctctgaaaaatataatgagaattattttaatgagctgacgccttatcttgatgatatctccgatgcggacgctgactgcatggttcaaacaatccagaaattttacgacatcatgtgtgaaaggagcattcaaaatgacagataaaactgctgattttacgcaaggaagcattctaaagaaactggtagcatttatgatgcctgtgcttggcgcactaatccttcaggcagcgtatggagcggttgaccttctggtcgttggaagatttggttctacctccggactttctgcagtttctaccggaagtcaggttctgaatctggtcactttcgtagtcgtccagtttgctatgggtatcacggttctgatcgcgcgttatctcggcgaaaagaaaccggaacagattggctccgtcattggcggtgctgcaattgtatttacagcgatttcagttggattgttcatcgttatggtttgttttgcacacccgatcgcaatcctgatgcaggcacctgctgaagctgtcgaattgactactgtttacatccgtatctgcggtggcggaatcttcttcatcgtcgcctacaacctgctttctgcgattttccgtggactcggagacagcaagtctcctctgctttttgtacttgtcgcatgcatcataaatgttttcggtgacttgatacttgttgcaggtttccacatgaacgcagtcggtgccgcaattgcaactgttttcgcccaggcagtcagtgttgtcttcgcagtagttcttcttatcaaaaagaatttgccgtttaagattatgaaaaaagacttctgcctgaatccacagtgcaagaaattcctcattattggactccctcttgcgctccaggaattcctgacacagatgtcattcctcgcactctgcgcttttgtaaaccggctcggactggaggcttcttctggttacggcgttgcctgtaaaatcgtaaactttgcaatgctggtacctagcgcactcatgcaatctatggcttctttcgtctctcagaatgtcggtgccggaaaatcaaagcgtgcaaagaaatctatgttcaccggaatcgaagtcggcctggttgtcggatgtttcgtcttcgctcttgtatttcttaagggagatgtcctgtccggattcttctctacggatgccgacgttattcagaatggctttgcttacttgaaaggattcgcaccggaaacgattttaacagccgtcctcttcagcatgatcggttattttaatggaaatgataagacgctctgggttatgacacagggactcatccagacacttctggtccgtctgccaatggcatacatcatgagtatccagccgaatgccagcctgacaaagatcggtcttgctgcaccggtttctacagcagttggaattatgttaaacgttggattttatgtttatttaaatcggaaaaaatagccccctgcaaccgctgccaccggcattacaaccacgcaggcgattgctccgaagatcattgaggcgcaattttcaaacatgattttagaattcaacagtagttcaaacgaatatccctgcatccgcagataggaaaaaagcagaagtgattctcctaaatatgcaaacag
